United States Patent Application Publication US 2025/0320452 A1 - sequence listing, part 11

SEQ ID NO: 8 - DNA, 3977505 bp, synthetic construct (residues 1-1,988,753 of 3,977,505)
  source 1..3977505: mol_type = other DNA; note = Synthetic E.coli genome
agcttttcattctgactgcaacgggcaatatgtctctgtgtggattaaaaaaagagtgtctgatagcagcttctgaactggttacctgccgtgagtaaattaaaattttattgacttaggtcactaaatactttaaccaatataggcatagcgcacagacagataaaaattacagagtacacaacatccatgaaacgcattagcaccaccattaccaccaccatcaccattaccacaggtaacggtgcgggctgacgcgtacaggaaacacagaaaaaagcccgcacctgacagtgcgggcttttttttttcgaccaaaggtaacgaggtaacaaccatgcgagtgttgaagttcggcggtacaagtgtggcaaatgcagaacgttttctgcgtgttgccgatattctggaaagcaatgccaggcaggggcaggtggccaccgtcctctctgcccccgccaaaatcaccaaccacctggtggcgatgattgaaaaaaccattagcggccaggatgctttacccaatatcagcgatgccgaacgtatttttgccgaacttttgacgggactcgccgccgcccagccggggttcccgctggcgcaattgaaaactttcgtcgatcaggaatttgcccaaataaaacatgtcctgcatggcattagtttgttggggcagtgcccggatagcatcaacgctgcgctgatttgccgtggcgagaaaatgagcatcgccattatggccggcgtattagaagcgcgcggtcacaacgttactgttatcgatccggtcgaaaaactgctggcagtggggcattacctcgaatctaccgtcgatattgctgagtccacccgccgtattgcggcaagccgcattccggctgatcacatggtgctgatggcaggtttcaccgccggtaatgaaaaaggcgaactggtggtgcttggacgcaacggttccgactactctgctgcggtgctggctgcctgtttacgcgccgattgttgcgagatttggacggacgttgacggggtctatacctgcgacccgcgtcaggtgcccgatgcgaggttgttgaagagcatgtcctaccaggaagcgatggagctttcctacttcggcgctaaagttcttcacccccgcaccattacccccatcgcccagttccagatcccttgcctgattaaaaataccggaaatcctcaagcaccaggtacgctcattggtgccagccgtgatgaagacgaattaccggtcaagggcatttccaatctgaataacatggcaatgttcagcgtttctggtccggggatgaaagggatggtcggcatggcggcgcgcgtctttgcagcgatgagtcgcgcccgtatttccgtggtgctgattacgcaaagttcttccgaatacagcatcagtttctgcgttccacaaagcgactgtgtgcgagctgaacgggcaatgcaggaagagttctacctggaactgaaagaaggcttactggagccgctggcagtgacggaacggctggccattatcagcgtggtaggtgatggtatgcgcaccttgcgtgggatcagcgcgaaattctttgccgcactggcccgcgccaatatcaacattgtcgccattgctcagggatcttctgaacgcagtatctctgtcgtggtaaataacgatgatgcgaccactggcgtgcgcgttactcatcagatgctgttcaataccgatcaggttatcgaagtgtttgtgattggcgtcggtggcgttggcggtgcgctgctggagcaactgaagcgtcagcaaagctggctgaagaataaacatatcgacttacgtgtctgcggtgttgccaacagcaaggctctgctcaccaatgtacatggccttaatctggaaaactggcaggaagaactggcgcaagccaaagagccgtttaatctcgggcgcttaattcgcctcgtgaaagaatatcatctgctgaacccggtcattgttgactgcacttccagccaggcagtggcggatcaatatgccgacttcctgcgcgaaggtttccacgttgtcacgccgaacaaaaaggccaacaccagcagcatggattactaccatcagttgcgttatgcggcggaaaaaagccggcgtaaattcctctatgacaccaacgttggggctggattaccggttattgagaacctgcaaaatctgctcaatgcaggtgatgaattgatgaagttctccggcattctttctggtagcctttcttatatcttcggcaagttagacgaaggcatgagtttctccgaggcgaccacgctggcgcgggaaatgggttataccgaaccggacccgcgagatgatctttctggtatggatgtggcgcgtaaactattgattctcgctcgtgaaacgggacgtgaactggagctggcggatattgaaattgaacctgtgctgcccgcagagtttaacgccgagggtgatgttgccgcttttatggcgaatctgagtcaactcgacgatctctttgccgcgcgcgtggcgaaggcccgtgatgaaggaaaagttttgcgctatgttggcaatattgatgaagatggcgtctgccgcgtgaagattgccgaagtggatggtaatgatccgctgttcaaagtgaaaaatggcgaaaacgccctggccttctatagccactattatcagccgctgccgttggtactgcgcggatatggtgcgggcaatgacgttacagctgccggtgtctttgctgatctgctacgtaccctcagttggaagttaggagtctgacatggttaaagtttatgccccggcttccagtgccaatatgagcgtcgggtttgatgtgctcggggcggcggtgacacctgttgatggtgcattgctcggagatgtagtcacggttgaggcggcagagacattcagtctcaacaacctcggacgctttgccgataagctgccgagtgaaccacgggaaaatatcgtttatcagtgctgggagcgtttttgccaggaactgggtaagcaaattccagtggcgatgaccctggaaaagaatatgccgatcggtagcggcttaggctccagtgcctgtagcgtggtcgcggcgctgatggcgatgaatgaacactgcggcaagccgcttaatgacactcgtttgctggctttgatgggcgagctggaaggccgtatctccggcagcattcattacgacaacgtggcaccgtgttttctcggtggtatgcagttgatgatcgaagaaaacgacatcatcagccagcaagtgccagggtttgatgagtggctgtgggtgctggcgtatccggggattaaagtcagcacggcagaagccagggctattttaccggcgcagtatcgccgccaggattgcattgcgcacgggcgacatctggcaggcttcattcacgcctgctattcccgtcagcctgagcttgccgcgaagctgatgaaagatgttatcgctgaaccctaccgtgaacggttactgccaggcttccggcaggcgcggcaggcggtcgcggaaatcggcgcggtagcgagcggtatctccggctccggcccgaccttgttcgctctgtgtgacaagccggaaaccgcccagcgcgttgccgactggttgggtaagaactacctgcaaaatcaggaaggttttgttcatatttgccggctggatacggcgggcgcacgagtactggaaaactaaatgaaactctacaatctgaaagatcacaacgagcaggtcagctttgcgcaagccgtaacccaggggttgggcaaaaatcaggggctgttttttccgcacgacctgccggaattcagcctgactgaaattgatgagatgctgaagctggattttgtcacccgcagtgcgaagatcctcagcgcgtttattggtgatgaaatcccacaggaaatcctggaagagcgcgtgcgcgcggcgtttgccttcccggctccggtcgccaatgttgaaagcgatgtcggttgtctggaattgttccacgggccaacgctggcatttaaagatttcggcggtcgctttatggcacaaatgctgacccatattgcgggtgataagccagtgaccattctgaccgcgacctccggtgataccggagcggcagtggctcatgctttctacggtttaccgaatgtgaaagtggttatcctctatccacgaggcaaaatcagtccactgcaagaaaaactgttctgtacattgggcggcaatatcgaaactgttgccatcgacggcgatttcgatgcctgtcaggcgctggtgaagcaggcgtttgatgatgaagaactgaaagtggcgctagggttaaacagcgctaacagcattaacatcagccgtttgctggcgcagatttgctactactttgaagctgttgcgcagctgccgcaggagacgcgcaaccagctggttgtcagcgtgccaagcggaaacttcggcgatttgacggcgggtctgctggcgaagagtctcggtctgccggtgaaacgttttattgctgcgaccaacgtgaacgataccgtgccacgtttcctgcacgacggtcagtggagtcccaaagcgactcaggcgacgttatccaacgcgatggacgtgagtcagccgaacaactggccgcgtgtggaagagttgttccgccgcaaaatctggcaactgaaagagctgggttatgcagccgtggatgatgaaaccacgcaacagacaatgcgtgagctaaaagaactgggctacactagcgagccgcacgctgccgtagcttatcgtgcgctgcgtgatcagttgaatccaggcgaatatggcttgttcctcggcaccgcgcatccggcgaaatttaaagagagcgtggaagcgattctcggtgaaacgttggatctgccaaaagagctggcagaacgtgctgatttacccttgcttagtcataatctgcccgccgattttgctgcgttgcgtaaattgatgatgaatcatcagtaaaatctattcattatctcaatcaggccgggtttgcttttatgcagcccggcttttttatgaagaaattatggagaaaaatgacagggaaaaaggagaaattctcaataaatgcggtaacttagagattaggattgcggagaataacaaccgccgttctcatcgagtaatctccggatatcgacccataacgggcaatgataaaaggagtaacctgtgaaaaagatgcaatctatcgtactcgcactttccctggttctggtcgctcccatggcagcacaggctgcggaaattacgttagtcccgagtgtaaaattacagataggcgatcgtgataatcgtggctattactgggatggaggtcactggcgcgaccacggctggtggaaacaacattatgaatggcgaggcaatcgctggcacctacacggaccgccgccaccgccgcgccaccataagaaagctcctcatgatcatcacggcggtcatggtccaggcaaacatcaccgctaaatgacaaatgccgggtaacaatccggcattcagcgcctgatgcgacgctggcgcgtcttatcaggcctacgttaattctgcaatatattgaatctgcatgcttttgtaggcaggataaggcgttcacgccgcatccggcattgactgcaaacttaacgctgctcgtagcgtttaaacaccagttcgccattgctggaggaatcttcatcaaagaagtaaccttcgctattaaaaccagtcagttgctctggtttggtcagccgattttcaataatgaaacgactcatcagaccgcgtgctttcttagcgtagaagctgatgatcttaaatttgccgttcttctcatcgaggaacaccggcttgataatctcggcattcaatttcttcggcttcacgcttttaaaatactcatcactcgccagattaatcaccacattatcgccttgtgctgcgagcgcctcgttcagcttgttggtgatgatatctccccagaattgatacagatctttccctcgggcattctcaagacggatccccatttccagacgataaggctgcattaaatcgagcgggcggagtacgccatacaagccggaaagcattcgcaaatgctgttgggcaaaatcgaaatcgtcttcgctgaaggtttcggcctgcaagccggtgtagacatcacctttaaacgccagaatcgcctggcgggcattcgccggcgtgaaatctggctgccagtcatgaaagcgagcggcgttgatacccgccagtttgtcgctgatgcgcatcagcgtgctaatctgcggaggcgtcagtttccgcgcctcatggatcaactgctgggaattgtctaacagctccggcagcgtatagcgcgtggtggtcaacgggctttggtaatcaagcgttttcgcaggactaataagaatcagcatatccagtccttgcaggaaatttatgccgactttagcaaaaaatgagaatgagttgatcgatagttgtgattactcctggctaacatcatcccacgcgtccggagaaagctggcgaccgatatccggataacgcaatggatcaaacaccgggcgcacgccgagtttacgctggcgtagataatcactggcaatggtatgaaccacagggctgagcagtaaaatggcggtcaaattggtaatagccatgcaggccattatgatatctgccagttgccacatcagcggaaggcttagcaaggtgccgccgatgaccgttgcgaaggtgcagatccgcaaacaccagatcgctttagggttgttcaggcgtaaaaagaagagattgttttcggcataaatgtagttggcaacgatggagctgaaggcaaacagaataaccacaagggtaacaaactcagcaccccaggaacccattagcacccgcatcgccttctggataagctgaataccttccagcggcatgtaggttgtgccgttacccgccagtaatatcagcatggcgcttgccgtacagatgaccagggtgtcgataaaaatgccaatcatctggacaatcccttgcgctgccggatgcggaggccaggacgccgctgccgctgccgcgtttggcgtgctacccattcccgcctcattggaaaacatactgcgctgaaaaccgttagtaatcgcctggcttaaggtatatcccgccgcgccgcctgccgcttcctgccagccaaaagcactctcaaaaatagaccaaatgacgtggggaagttgcccgatattcattacgcaaattaccaggctggtcagtacccagattatcgccatcaacgggacaaagccctgcatgagccgggcgacgccatgaagaccgcgagtgattgccagcagagtaaagacagcgagaataatgcctgtcaccagcgggggaaaatcaaaagaaaaactcagggcgcgggcaacggcgttcgcttgaactccgctgaaaattatgccataggcgatgagcaaaaagacggcgaacagaacgcccatccagcgcatccccagcccgcgcgccatataccatgccggtccgccacgaaactgcccattgacgtcacgttctttataaagttgtgccagagaacattcggcaaagctggtcgccatgccgataaacgcggcaacccacatccaaaagacggctccaggtccaccggcggtaatagccagcgcaacgccggccaggttgccgctacccacgcgcgccgcaagactggtacacaaactctgaaaactggttaaaccgcctggctgtggatgaatgctatttttaagacttttgccaaactggcggatgtagcgaaactgcacaaatccggtgcgaaaagtgaaccaacaacctgcgccgaagagcaggtaaatcattacgcttccccaaaggacgctgttaatgaaggagaaaaaatctggcatgcatatccctcttattgccggccgcgatgactttcctgtgtaaacgttaccaattgtttaagaagtatatacgctacgaggtacttgataacttctgcgtagcatacatgaggttttgtataaaaatggcgggcgatatcaacgcagtgtcagaaatccgaaacagtctcgcctggcgataaccgtcttgtcggcggttgcgctgacgttgcgtcgtgatatcatcagggcagaccggttacatccccctaacaagctgtttaaagagaaatactatcatgacggacaaattgacctcccttcgtcagtacaccaccgtagtggccgacactggggacatcgcggcaatgaagctgtatcaaccgcaggatgccacaaccaacccttctctcattcttaacgcagcgcagattccggaataccgtaagttgattgatgatgctgtcgcctgggcgaaacagcagagcaacgatcgcgcgcagcagatcgtggacgcgaccgacaaactggcagtaaatattggtctggaaatcctgaaactggttccgggccgtatcagtactgaagttgatgcgcgtctttcctatgacaccgaagcgagtattgcgaaagcaaaacgcctgatcaaactctacaacgatgctggtattagcaacgatcgtattctgatcaaactggcttctacctggcagggtatccgtgctgcagaacagctggaaaaagaaggcatcaactgtaacctgaccctgctgttctccttcgctcaggctcgtgcttgtgcggaagcgggcgtgttcctgatcagcccgtttgttggccgtattcttgactggtacaaagcgaataccgataagaaagagtacgctccggcagaagatccgggcgtggtttctgtatctgaaatctaccagtactacaaagagcacggttatgaaaccgtggttatgggcgcaagcttccgtaacatcggcgaaattctggaactggcaggctgcgaccgtctgaccatcgcaccggcactgctgaaagagctggcggagagcgaaggggctatcgaacgtaaactgtcttacaccggcgaagtgaaagcgcgtccggcgcgtatcactgagtccgagttcctgtggcagcacaaccaggatccaatggcagtagataaactggcggaaggtatccgtaagtttgctattgaccaggaaaaactggaaaaaatgatcggcgatctgctgtaatcattcttagcgtgaccgggaagtcggtcacgctacctcttctgaagcctgtctgtcactcccttcgcagtgtatcattctgtttaacgagactgtttaaacggaaaaatcttgatgaatactttacgtattggcttagtttccatctctgatcgcgcatccagcggcgtttatcaggataaaggcatccctgcgctggaagaatggctgacaagcgcgctaaccacgccgtttgaactggaaacccgcttaatccccgatgagcaggcgatcatcgagcaaacgttgtgtgagctggtggatgaaatgagttgccatctggtgctcaccacgggcggaactggcccggcgcgtcgtgacgtaacgcccgatgcgacgctggcagtagcggaccgcgagatgcctggctttggtgaacagatgcgccagatcagcctgcattttgtaccaactgcgatccttagccgtcaggtgggcgtgattcgcaaacaggcgctgatccttaacttacccggtcagccgaagtctattaaagagacgctggaaggtgtgaaggacgctgagggtaacgttgtggtacacggtatttttgccagcgtaccgtactgcattcagttgctggaagggccatacgttgaaacggcaccggaagtggttgcagcattcagaccgaagagtgcaagacgcgacgttagcgaataaaaaaatccccccgagcggggggatctcaaaacaattagtgggattcaccaatcggcagaacggtgcgaccaaactgctcgttcagtacttcacccatcgccagatagattgcgctggcaccgcagatcagcccaatccagccggcaaagtggatgattgcggcgttaccggcaatgttaccgatcgccagcagggcaaacagcacggtcaggctaaagaaaacgaattgcagaacgcgtgcgcctttcagcgtgccgaagaacataaacagcgtaaatacgccccacagacccaggtagacaccaaggaactgtgcatttggcgcatcggtcagacccagtttcggcatcagcagaatcgcaaccagcgtcagccagaaagaaccgtaagaggtgaatgcggttaaaccgaaagtgttgccttttttgtactccagcagaccagcaaaaatttgcgcgatgccgccgtagaaaatgcccatggcaagaataatgccgtccagagcgaaataacccacgttgtgcaggttaagcagaatggtggtcatgccgaagcccatcaggcccagcggtgccggattagccaacttagtgttgcccataattcctcaaaaatcatcatcgaatgaatggtgaaataatttccctgaataactgtagtgttttcagggcgcggcataataatcagccagtggggcagtgtctacgatcttttgaggggaaaatgaaaattttccccggtttccggtatcagacctgagtggcgctaaccatccggcgcaggcaggcgatttgcagtacggctggaatcgtcacgcgataggcgctgccgctgaccgctttaaccccatttagtgccgcacctacagggccttccagccccgcgccgcgcagcaaaccatgcccaagtacgctcattgctgcgtgggtgcgtaaaatgcgggtcagttggctggaaagcaaatggctcacaccttttgccaataatttgtctttcatcagcagcggcagcagctcttccagctcattcaccctggcatcgaccgcgtgcagaaactcctgcttatgttcctcgtccattttcttccaggtattacgcagaaattgttccagtaactgttgctcaatttcaaacgtagacatctctttgtcggctttcagcttcaatcgcttactaacatcgagcaaaatggcccgatacaatttaccgtgtccgcgcagtttgttggcgatactatcgccaccaaaatgctgtaattctccggcaatcagctgccagttgcggcgatgttgctcgggatgcccttccatgcttttaaacagttcgttgcgcatcagtacgctggagaggcgagttttgcctttttcattatgggtgagcaatcgggcgaaatttgccaactgttcctcactacaatgctgaagaaaatccagatcactatcattcaggtaattaacattcattttttgtggcttctatattctggcgttagtcgtcgccgataattttcagcgtggccatatcgctactgttcaccgtatgaccgctaaaggtgattttactgacgcagcgtttattgtcgttatcgctgttaatgttgatccagtcagtggtttgcccttcttttatttcactaggaatattcaggctctgactggcgctacgggcggctttgaaataaacgcttgcaccgcttaactgtaaatcgccatggtcggcagagagttgtatgcgtttcacaatgcgacaaacaggaagtttcagcgccagatcgttggtttcgttacgcggcattgcaatggcgccgaggagtttatggtcgtttgcctgcgccgtgcagcacagcatcaggctaatcgccaggctggcggaaatcgtaaaaacggatttcataaggattctcttagtgggaagaggtagggggatgaatacccactagtttactgctgataaagagaagattcaggcacgtaatcttttctttttattacaattttttgatgaatgccttggctgcgattcattctttatatgaataaaattgctgtcaattttacgtcttgtcctgccatatcgcgaaatttctgcgcaaaagcacaaaaaatttttgcatctcccccttgatgacgtggtttacgaccccatttagtagtcaaccgcagtgagtgagtctgcaaaaaaatgaaattgggcagttgaaaccagacgtttcgcccctattacagactcacaaccacatgatgaccgaatatatagtggagacgtttagatgggtaaaataattggtatcgacctgggtactaccaactcttgtgtagcgattatggatggcaccactcctcgcgtgctggagaacgccgaaggcgatcgcaccacgccttctatcattgcctatacccaggatggtgaaactctagttggtcagccggctaaacgtcaggcagtgacgaacccgcaaaacactctgtttgcgattaaacgcctgattggtcgccgcttccaggacgaagaagtacagcgtgatgtttccatcatgccgttcaaaattattgctgctgataacggcgacgcatgggtcgaagttaaaggccagaaaatggcaccgccgcagatttctgctgaagtgctgaaaaaaatgaagaaaaccgctgaagattacctgggtgaaccggtaactgaagctgttatcaccgtaccggcatactttaacgatgctcagcgtcaggcaaccaaagacgcaggccgtatcgctggtctggaagtaaaacgtatcatcaacgaaccgaccgcagctgcgctggcttacggtctggacaaaggcactggcaaccgtactatcgcggtttatgacctgggtggtggtactttcgatatttctattatcgaaatcgacgaagttgacggcgaaaaaaccttcgaagttctggcaaccaacggtgatacccacctggggggtgaagacttcgacagccgtctgatcaactatctggttgaagaattcaagaaagatcagggcattgacctgcgcaacgatccgctggcaatgcagcgcctgaaagaagcggcagaaaaagcgaaaatcgaactgtcttccgctcagcagaccgacgttaacctgccatacatcactgcagacgcgaccggtccgaaacacatgaacatcaaagtgactcgtgcgaaactggaaagcctggttgaagatctggtaaaccgttccattgagccgctgaaagttgcactgcaggacgctggcctgtccgtatctgatatcgacgacgttatcctcgttggtggtcagactcgtatgccaatggttcagaagaaagttgctgagttctttggtaaagagccgcgtaaagacgttaacccggacgaagctgtagcaatcggtgctgctgttcagggtggtgttctgactggtgacgtaaaagacgtactgctgctggacgttaccccgctgtctctgggtatcgaaaccatgggcggtgtgatgacgacgctgatcgcgaaaaacaccactatcccgaccaagcacagccaggtgttctctaccgctgaagacaaccagtctgcggtaaccatccatgtgctgcagggtgaacgtaaacgtgcggctgataacaaatctctgggtcagttcaacctagatggtatcaacccggcaccgcgcggcatgccgcagatcgaagttaccttcgatatcgatgctgacggtatcctgcacgtttccgcgaaagataaaaacagcggtaaagagcagaagatcaccatcaaggcttcttctggtctgaacgaagatgaaatccagaaaatggtacgcgacgcagaagctaacgccgaagctgaccgtaagtttgaagagctggtacagactcgcaaccagggcgaccatctgctgcacagcacccgtaagcaggttgaagaagcaggcgacaaactgccggctgacgacaaaactgctatcgagtctgcgctgactgcactggaaactgctctgaaaggtgaagacaaagccgctatcgaagcgaaaatgcaggaactggcacaggtttcccagaaactgatggaaatcgcccagcagcaacatgcccagcagcagactgccggtgctgatgcttctgcaaacaacgcgaaagatgacgatgttgtcgacgctgaatttgaagaagtcaaagacaaaaaataatcgccctataaacgggtaattatactgacacgggcgaaggggaatttcctctccgcccgtgcattcatctaggggcaatttaaaaaagatggctaagcaagattattacgagattttaggcgtttccaaaacagcggaagagcgtgaaatcagaaaggcctacaaacgcctggccatgaaataccacccggaccgtaaccagggtgacaaagaggccgaggcgaaatttaaagagatcaaggaagcttatgaagttctgaccgacagccaaaaacgtgcggcatacgatcagtatggtcatgctgcgtttgagcaaggtggcatgggcggcggcggttttggcggcggcgcagacttcagcgatatttttggtgacgttttcggcgatatttttggcggcggacgtggtcgtcaacgtgcggcgcgcggtgctgatttacgctataacatggagctcaccctcgaagaagctgtacgtggcgtgaccaaagagatccgcattccgactctggaagagtgtgacgtttgccacggtagcggtgcaaaaccaggtacacagccgcagacttgtccgacctgtcatggttctggtcaggtgcagatgcgccagggattcttcgctgtacagcagacctgtccacactgtcagggccgcggtacgctgatcaaagatccgtgcaacaaatgtcatggtcatggtcgtgttgagcgcagcaaaacgctgtccgttaaaatcccggcaggggtggacactggagaccgcatccgtcttgcgggcgaaggtgaagcgggcgagcatggcgcaccggcaggcgatctgtacgttcaggttcaggttaaacagcacccgattttcgagcgtgaaggcaacaacctgtattgcgaagtcccgatcaacttcgctatggcggcgctgggtggcgaaatcgaagtaccgacccttgatggtcgcgtcaaactgaaagtgcctggcgaaacccagaccggtaagctattccgtatgcgcggtaaaggcgtcaagtctgtccgcggtggcgcacagggtgatttgctgtgccgcgttgtcgtcgaaacaccggtaggcctgaacgaaaggcagaaacagctgctgcaagagctgcaagaaagcttcggtggcccaaccggcgagcacaacagcccgcgcagtaagagcttctttgatggtgtgaagaagttttttgacgacctgacccgctaacctccccaaaagcctgcccgtgggcaggcctgggtaaaaatagggtgcgttgaagatatgcgagcacctgtaaagtggcggggatcactctacctcaatgtgtatcacaatatccatattctttgtgggggagtctggagattgagtagatattcttgttcagaatgtatcagccgatggttctacgattcttaagccacgaagagttcagatagtacaacggcatgtctcttttgactatctggcaaccggcagtgtgttctctcacgcatcacaaaagcagcaggcataaaaaaacccgcttgcgcgggctttttcacaaagcttcagcaaattggcgattaagccagtttgttgatctgtgcagtcaggttagccttatgacgtgcagctttgtttttgtggatcagacctttagcagcctgacggtccacgatcggttgcatttcgttaaatgctttctgtgcagcagctttgtcgccagcttcgatagctgcgtatactttcttgatgaaagtacgcatcatagagcgacggcttgcgttgtgcttacgagccttttcagactgaatggcgcgcttcttagcacttttgatattagccaaggtccaactcccaaatgtgttctatatggacaattcaaaggccgaggaatatgcccttttagccttcttttgtcaatggatttgtgcaaataagcgccgttaatgtgccggcacagcttacgtagtgatggcgcaggattctaccagcttgcggggtgtgaatacagcttttccgcgataaaaattgcagcaggcggtcagtttcttcccgtgatttgcgccatggcaatgaaaagccacttctttctgattagcgtactcaatcgccggttaaccttgaccgctgtacaaggtatactcggacgatttagcctgttttgagccagacatgaagctgatacgcggcatacataatctcagccaggccccgcaagaagggtgtgtgctgactattggtaatttcgacggcgtgcatcgcggtcatcgcgcgctgttacagggcttgcaggaagaagggcgcaagcgcaacttaccggtgatggtgatgctttttgaacctcaaccactggaactgtttgctaccgataaagccccggcaagactgacccggctgcgggaaaaactgcgttaccttgcagagtgtggcgttgattacgtgctgtgcgtgcgtttcgacaggcgtttcgcggcgttaaccgcgcaaaatttcatcagcgatcttctggtgaagcatttgcgcgtaaaatttcttgccgtaggtgatgatttccgctttggcgctggtcgtgaaggcgatttcttgttattacagaaagctggcatggaatacggcttcgatatcaccagtacgcaaactttttgcgaaggtggcgtgcgcatcagcagcaccgccgtgcgtcaggcccttgcggatgacaatctggctctggcagagagtttactggggcacccgtttgccatctccgggcgtgtagtccacggtgatgaattagggcgcactataggtttcccgacggcgaatgtaccgctgcgccgtcaggtttccccggtgaaaggggtttatgcggtagaagtgctgggcctcggtgaaaagccgttacccggcgtggcaaacatcggaacacgcccaacggttgccggtattcgccagcagctggaagtgcatttgttagatgttgcaatggacctttacggtcgccatatacaagtagtgctgcgtaaaaaaatacgcaatgagcagcgatttgcgagcctggacgaactgaaagcgcagattgcgcgtgatgaattaaccgcccgcgaattttttgggctaacaaaaccggcttaagcctgttatgtaatcaaaccgaaatacggaaccgagaatctgatgagtgactataaaagtaccctgaatttgccggaaacagggttcccgatgcgtggcgatctcgccaagcgcgaacccggaatgctggcgcgttggactgatgatgatctgtacggcatcatccgtgcggctaaaaaaggcaaaaaaaccttcattctgcatgatggccctccttatgcgaatggcagcattcatattggtcacagcgttaacaagattctgaaagacattatcgtgaagtccaaagggctttccggttatgacagcccgtatgtgcctggctgggactgccacggtctgccgatcgagctgaaagtcgagcaagaatacggtaagccgggtgagaaattcaccgccgccgagttccgcgccaagtgccgcgaatacgcggcgacccaggttgacggtcaacgcaaagactttatccgtctgggcgtgctgggcgactggagccacccgtacctgaccatggacttcaaaactgaagccaacatcatccgcgcgctgggcaaaatcatcggcaacggtcacctgcacaaaggcgcgaagccagttcactggtgcgttgactgccgttctgcgctggcggaagcggaagttgagtattacgacaaaacttctccgtccatcgacgttgctttccaggcagtcgatcaggatgcactgaaagcaaaatttgccgtaagcaacgttaacggcccaatcagcctggtaatctggaccaccacgccgtggactctgcctgccaaccgcgcaatctctattgcaccagatttcgactatgcgctggtgcagatcgacggtcaggccgtgattctggcgaaagatctggttgaaagcgtaatgcagcgtatcggcgtgaccgattacaccattctcggcacggtaaaaggtgcggagcttgagctgctgcgctttacccatccgtttatgggcttcgacgttccggcaatcctcggcgatcacgttaccctggatgccggtaccggtgccgttcacaccgcgcctggccacggcccggacgactatgtgatcggtcagaaatacggcctggaaaccgctaacccggttggcccggacggcacttatctgccgggcacttatccgacgctggatggcgtgaacgtcttcaaagcgaacgacatcgtcgttgcgctgctgcaggaaaaaggcgcgctgctgcacgttgagaaaatgcagcacagctatccgtgctgctggcgtcacaaaacgccgatcatcttccgcgcgacgccgcagtggttcgtcagcatggatcagaaaggtctgcgtgcgcagagtctgaaagagatcaaaggcgtgcagtggatcccggactggggccaggcgcgtatcgagagcatggttgctaaccgtcctgactggtgtatctcccgtcagcgcacctggggtgtaccgatgagtctgttcgtgcacaaagacacggaagagctgcatccgcgtacccttgaactgatggaagaagtggcaaaacgcgttgaagtcgatggcatccaggcgtggtgggatctcgatgcgaaagagatcctcggcgacgaagctgatcagtacgtgaaagtgccggacacattggatgtatggtttgactccggatctacccactcttctgttgttgacgtgcgtccggaatttgccggtcacgcagcggacatgtatctggaaggttctgaccaacaccgcggctggttcatgtcttccctaatgatctccaccgcgatgaagggtaaagcgccgtatcgtcaggtactgacccacggctttaccgtggatggtcagggccgcaagatgtctaaatccatcggcaataccgttagcccgcaggatgtgatgaacaaactgggcgcggatattctgcgtctgtgggtggcaagtaccgactacaccggtgaaatggccgtttctgacgagatcctgaaacgtgctgccgatagctatcgtcgtatccgtaacaccgcgcgcttcctgctggcaaacctgaacggttttgatccagcaaaagatatggtgaaaccggaagagatggtggtactggatcgctgggccgtaggttgtgcgaaagcggcacaggaagacatcctcaaggcgtacgaagcatacgatttccacgaagtggtacagcgtctgatgcgcttctgctccgttgagatgggttccttctacctcgacatcatcaaagaccgtcagtacaccgccaaagcggacagtgtggcgcgtcgtagctgccagactgcgctatatcacatcgcagaagcgctggtgcgctggatggcaccaatcctctccttcaccgctgatgaagtgtggggctacctgccgggcgaacgtgaaaaatacgtcttcaccggtgagtggtacgaaggcctgtttggcctggcagacagtgaagcgatgaacgatgcgttctgggacgagctgttgaaagtgcgtggcgaagtgaacaaagtcattgagcaagcgcgtgccgacaagaaagtgggtggcagcctggaagcggcagtaaccttgtatgcagaaccggaactgagcgcgaaactgaccgcgctgggcgatgaattacgatttgtcctgttgacctccggcgctaccgttgcagactataacgacgcacctgctgatgctcagcagagcgaagtactcaaagggctgaaagtcgcgttgagtaaagccgaaggtgagaagtgcccacgctgctggcactacacccaggatgtcggcaaggtggcggaacacgcagaaatctgcggccgctgtgtcagcaacgtcgccggtgacggtgaaaaacgtaagtttgcctgatgagtcaaagcatctgtagtacagggctacgctggctgtggctggtggtagtcgtgctgattatcgatctgggcagcaaatacctgatcctccagaactttgctctgggggatacggtcccgctgttcccgagccttaatctgcattatgcgcgtaactatggcgcggcgtttagtttccttgccgatagcggcggctggcagcgttggttctttgccggtattgcgattggtattagcgtgatcctggcagtgatgatgtatcgcagcaaggccacgcagaagctaaacaatatcgcttacgcgctgattattggcggcgcgctgggcaacctgttcgaccgcctgtggcacggcttcgttgtcgatatgatcgacttctacgtcggcgactggcacttcgccaccttcaaccttgccgatactgccatctgtgtcggtgcggcactgattgtgctggaaggttttttgccttctagagcgaaaaaacaataataaaccctgccggatgcgatgctgacgcatcttatccggcctacagattgctgcgaaatcgtaggccggataaggcgtttacgccgcatccggcaaaaatccttaaatataagagcaaacctgcatgtctgaatctgtacagagcaatagcgccgtcctggtgcacttcacgctaaaactcgacgatggcaccaccgccgagtctacccgcaacaacggtaaaccggcgctgttccgcctgggtgatgcttctctttctgaagggctggagcaacacctgttggggctgaaagtgggcgataaaaccaccttcagcttggagccagatgcggcgtttggcgtgccgagtccggacctgattcagtacttctcccgccgtgaatttatggatgcaggcgagccagaaattggcgcaatcatgctttttaccgcaatggatggcagtgagatgcctggcgtgatccgcgaaattaacggcgactccattaccgttgatttcaaccatccgctggccgggcagaccgttcattttgatattgaagtgctggaaatcgatccggcactggaggcgtaacatgcagatcctgttggccaacccgcgtggtttttgtgccggggtagaccgcgctatcagcattgttgaaaacgcgctggccatttacggcgcaccgatatatgtccgtcacgaagtggtacataaccgctatgtggtcgatagcttgcgtgagcgtggggctatctttattgagcagattagcgaagtaccggacggcgcgatcctgattttctccgcacacggtgtttctcaggcggtacgtaacgaagcaaaaagtcgcgatttgacggtgtttgatgccacctgtccgctggtgaccaaagtgcatatggaagtcgcccgcgccagtcgccgtggcgaagaatctattctcatcggtcacgccgggcacccggaagtggaagggacaatgggccagtacagtaacccggaagggggaatgtatctggtcgaaagcccggacgatgtgtggaaactgacggtcaaaaacgaagagaagctctcctttatgacccagaccacgctgagcgtggatgacacgtctgatgtgatcgacgcgctgcgtaaacgcttcccgaaaattgtcggtccgcgcaaagatgacatctgctacgccacgactaaccgtcaggaagcggtacgcgccctggcagaacaggcggaagttgtgttggtggtcggtagcaaaaactcctccaactccaaccgtctggcggagctggcccagcgtatgggcaaacgcgcgtttttgattgacgatgcgaaagacatccaggaagagtgggtgaaagaggttaaatgcgtcggcgtgactgcgggcgcaagcgctccggatattctggtgcagaatgtggtggcgcgtttgcagcagctgggcggtggtgaagccattccgctggaaggccgtgaagaaaacattgttttcgaagtgccgaaagagctgcgtgtcgatattcgtgaagtcgattaagtcattagcagcctaagttatgcgaaaatgccggtcttgttaccggcattttttatggagaaaacatgcgtttacctatcttcctcgatactgaccccggcattgacgatgccgtcgccattgccgccgcgatttttgcacccgaactcgacctgcaactgatgaccaccgtcgcgggtaatgtcagcgttgagaaaactacccgcaatgccctgcaactgctgcatttctggaatgcggagattccgctcgcccaaggggccgctgtgccactggtacgcgcaccgcgtgatgcggcatctgtgcacggcgaaagcggaatggctggctacgactttgttgagcacaaccgaaagccgctcgggataccggcgtttctggcgattcgggatgccctgatgcgtgcaccagagcctgttaccctggtggccatcggcccgttaaccaatattgcgctgttacttagtcaatgcccggaatgcaagccgtatattcgccgtctggtgatcatgggtggttctgccggacgcggcaactgtacgccaaacgccgagtttaatattgctgccgatccagaagctgctgcctgtgtcttccgcagtggtattgaaatcgtcatgtgcggtttggatgtcaccaatcaggcaatattaactcctgactatctctctacactgccgcagttaaaccgtaccgggaaaatgcttcacgccctgtttagccactaccgtagcggcagtatgcaaagcggcttgcgaatgcacgatctctgcgccatcgcctggctggtgcgcccggacctgttcactctcaaaccctgttttgtggcagtggaaactcagggcgaatttaccagtggcacgacggtggttgatatcgacggttgcctgggcaagccagccaatgtacaggtggcattggatctggatgtgaaaggcttccagcagtgggtggctgaggtgctggctctggcgagctaacctgtcacatgttattggcatgcagtcattcatcgactcatgcctttcactgatatccctccctgtttatcattaatttctaattatcagcgtttttggctggcggcgtagcgatgcgctggttactctgaaaacggtctatgcaaattaacaaaagagaatagctatgcatgatgcaaacatccgcgttgccatcgcgggagccggggggcgtatgggccgccagttgattcaggcggcgctggcattagagggcgtgcagttgggcgctgcgctggagcgtgaaggatcttctttactgggcagcgacgccggtgagctggccggagccgggaaaacaggcgttaccgtgcaaagcagcctcgatgcggtaaaagatgattttgatgtgtttatcgattttacccgtccggaaggtacgctgaaccatctcgctttttgtcgccagcatggcaaagggatggtgatcggcactacggggtttgacgaagccggtaaacaagcaattcgtgacgccgctgccgatattgcgattgtctttgctgccaattttagcgttggcgttaacgtcatgcttaagctgctggagaaagcagccaaagtgatgggtgactacaccgatatcgaaattattgaagcacatcatagacataaagttgatgcgccgagtggcaccgcactggcaatgggagaggcgatcgcccacgcccttgataaagatctgaaagattgcgcggtctacagtcgtgaaggccacaccggtgaacgtgtgcctggcaccattggttttgccaccgtgcgtgcaggtgacatcgttggtgaacataccgcgatgtttgccgatattggcgagcgtctggagatcacccataaggcgtccagccgtatgacatttgctaacggcgcggtaagaagcgctttgtggttgagtggtaaggaaagcggtctttttgatatgcgagatgtacttgatctcaataatttgtaaccacaaaatatttgttatggtgcaaaaataacacatttaatttattgattataaagggctttaatttttggcccttttatttttggtgttatgtttttaaattgtctataagtgccaaaaattacatgttttgtcttctgtttttgttgttttaatgtaaattttgaccatttggtccacttttttctgctcgtttttatttcatgcaatcttcttgctgcgcaagcgttttccagaacaggttagatgatctttttgtcgcttaatgcctgtaaaacatgcatgagccacaaaataatataaaaaatcccgccattaagttgacttttagcgcccatatctccagaatgccgccgtttgccagaaattcgtcggtaagcagatttgcattgatttacgtcatcattgtgaattaatatgcaaataaagtgagtgaatattctctggagggtgttttgattaagagtgcgctattggttctggaagacggaacccagtttcacggtcgggccataggggcaacaggtagcgcggttggggaagtcgttttcaatactagtatgaccggttatcaagaaatcctcactgatccttcctattctcgtcaaatcgttactcttacttatccccatattggcaatgtcggcaccaatgacgccgatgaagaatcttctcaggtacatgcacaaggtctggtgattcgcgacctgccgctgattgccagcaacttccgtaataccgaagacctctcttcttacctgaaacgccataacatcgtggcgattgccgatatcgatacccgtaagctgacgcgtttactgcgcgagaaaggcgcacagaatggctgcattatcgcgggcgataacccggatgcggcgctggcgttagaaaaagcccgcgcgttcccaggtctgaatggcatggatctggcaaaagaagtgaccaccgcagaagcctatagctggacacaagggagctggacgttgaccggtggcctgccagaagcgaaaaaagaagacgagctgccgttccacgtcgtggcttatgattttggtgccaagcgcaacatcctgcggatgctggtggatagaggctgtcgcctgaccatcgttccggcgcaaacttctgcggaagatgtgctgaaaatgaatccagacggcatcttcctctccaacggtcctggcgacccggccccgtgcgattacgccattaccgccatccagaaattcctcgaaaccgatattccggtattcggcatctgtctcggtcatcagctgctggcgctggcgagcggtgcgaagactgtcaaaatgaaatttggtcaccacggcggcaaccatccggttaaagatgtggagaaaaacgtggtaatgatcaccgcccagaaccacggttttgcggtggacgaagcaacattacctgcaaacctgcgtgtcacgcataaatccctgttcgacggtacgttacagggcattcatcgcaccgataaaccggcattcagcttccaggggcaccctgaagccagccctggtccacacgacgccgcgccgttgttcgaccactttatcgagttaattgagcagtaccgtaaaaccgctaagtaatcaggagtaaaagagccatgccaaaacgtacagatataaaaagtatcctgattctgggtgcgggcccgattgttatcggtcaggcgtgtgagtttgactactctggcgcgcaagcgtgtaaagccctgcgtgaagagggttaccgcgtcattctggtgaactccaacccggcgaccatcatgaccgacccggaaatggctgatgcaacctacatcgagccgattcactgggaagttgtacgcaagattattgaaaaagagcgcccggacgcggtgctgccaacgatgggcggtcagacggcgctgaactgcgcgctggagctggaacgtcagggcgtgttggaagagttcggtgtcaccatgattggtgccactgccgatgcgattgataaagcagaagaccgccgtcgtttcgacgtagcgatgaagaaaattggtctggaaaccgcgcgttccggtatcgcacacacgatggaagaagcgctggcggttgccgctgacgtgggcttcccgtgcattattcgcccatcctttaccatgggcggtagcggcggcggtatcgcttataaccgtgaagagtttgaagaaatttgcgcccgcggtctggatctctctccgaccaaagagttgctgattgatgagagcctgatcggctggaaagagtacgagatggaagtggtgcgtgataaaaacgacaactgcatcatcgtctgctctatcgaaaacttcgatgcgatgggcatccacaccggtgactccatcactgtcgcgccagcccaaacgctgaccgacaaagaatatcaaatcatgcgtaacgccagcatggcggtgctgcgtgaaatcggcgttgaaaccggtggttccaacgttcagtttgcggtgaacccgaaaaacggtcgtctgattgttatcgaaatgaacccacgcgtgtcccgttctagcgcgctggcgagcaaagcgaccggtttcccgattgctaaagtggcggcgaaactggcggtgggttacaccctcgacgaactgatgaacgacatcactggcggacgtactccggcctccttcgagccgtccatcgactatgtggttactaaaattcctcgcttcaacttcgaaaaattcgccggtgctaacgaccgtctgaccactcagatgaaaagcgttggcgaagtgatggcgattggtcgcacgcagcaggaatccctgcaaaaagcgctgcgcggcctggaagtcggtgcgactggattcgacccgaaagtgagcctggatgacccggaagcgttaaccaaaatccgtcgcgaactgaaagacgcaggcgcagatcgtatctggtacatcgccgatgcgttccgtgcgggcctgtctgtggacggcgtcttcaacctgaccaacattgaccgctggttcctggtacagattgaagagctggtgcgtctggaagagaaagtggcggaagtgggcatcactggcctgaacgctgacttcctgcgccagctgaaacgcaaaggctttgccgatgcgcgcttggcaaaactggcgggcgtacgcgaagcggaaatccgtaagctgcgtgaccagtatgacctgcacccggtttataagcgcgtggatacctgtgcggcagagttcgccaccgacaccgcttacatgtactccacttatgaagaagagtgcgaagcgaatccgtctaccgaccgtgaaaaaatcatggtgcttggcggcggcccgaaccgtatcggtcagggtatcgaattcgactactgttgcgtacacgccagcctggcgctgcgcgaagacggttacgaaaccattatggttaactgtaacccggaaaccgtctccaccgactacgacacttccgaccgcctctacttcgagccggtaactctggaagatgtgctggaaatcgtgcgtatcgagaagccgaaaggcgttatcgtccagtacggcggtcagaccccgctgaaactggcgcgcgcgctggaagctgctggcgtaccggttatcggcaccagcccggatgctatcgaccgtgcagaagaccgtgaacgcttccagcatgcggttgagcgtctgaaactgaaacaaccggcgaacgccaccgttaccgctattgaaatggcggtagagaaggcgaaagagattggctacccgctggtggtacgtccgtcttacgttctcggcggtcgggcgatggaaatcgtctatgacgaagctgacctgcgtcgctacttccagacggcggtcagcgtgtctaacgatgcgccagtgttgctggaccacttcctcgatgacgcggtagaagttgacgtggatgccatctgcgacggcgaaatggtgctgattggcggcatcatggaacatattgagcaggcgggcgtgcactccggtgactccgcatgttctctgccagcctacaccttaagtcaggaaattcaggatgtgatgcgccagcaggtgcagaaactggccttcgaattgcaggtgcgcggcctgatgaacgtgcagtttgcggtgaaaaacaacgaagtctacctgattgaagttaacccgcgtgcggcgcgtaccgttccgttcgtctccaaagccaccggcgtaccgctggcaaaagtggcggcgcgcgtgatggctggcaaaagcctggctgagcagggcgtaaccaaagaagttatcccgccgtactacagcgtgaaagaagtggtgctgccgttcaataaattcccgggcgttgacccgctgttagggccagaaatgcgctctaccggggaagtcatgggcgtgggccgcaccttcgctgaagcgtttgccaaagcgcagctgggcagcaactccaccatgaagaaacacggtcgtgcgctgctttccgtgcgcgaaggcgataaagaacgcgtggtggacctggcggcaaaactgctgaaacagggcttcgagctggatgcgacccacggcacggcgattgtgctgggcgaagcaggtatcaacccgcgtctggtaaacaaggtgcatgaaggccgtccgcacattcaggaccgtatcaagaatggcgaatatacctacatcatcaacaccaccagtggccgtcgtgcgattgaagactcccgcgtgattcgtcgcagtgcgctgcaatataaagtgcattacgacaccaccctgaacggcggctttgccaccgcgatggcgctgaatgccgatgcgactgaaaaagtaattagcgtgcaggaaatgcacgcacagatcaaataatagcgtgtcatggcagatatttttcatccgctaatttgatcgaataactaatacggttctctgatgaggaccgtttttttttgcccattaagtaaatcttttggggaatcgatatttttgatgacataagcaggatttagctcacacttatcgacggtgaagttgcatactatcgatatatccacaattttaatatggccttgtttaattgcttcaaaacgagtcatagccagacttttaatttgtgaaactggagttcgtatgtgtgaaggatatgttgaaaaaccactctacttgttaatcgccgaatggatgatggctgaaaatcggtgggtgatagcaagagagatctctattcatttcgatattgaacacagcaaggcggttaataccctgacttatattctgagcgaagtcacagaaataagctgcgaagttaagatgatccctaataagctggaagggcggggatgccagtgtcagcgactggttaaagtggtcgatatcgatgagcaaatttacgcgcgcctgcgcaataacagtcgggaaaaattagtcggtgtaagaaagacgccgcgtattcctgccgttccgctcacggaacttaaccgcgagcagaagtggcagatgatgttgagtaagagtatgcgtcgttaattttatctcgttgataccgggcgtcctgcttgccagatgcgatgttgtagcatcttatccagcaaccaggtcgcatccggcaagatcaccgtttaggcgtcacatccgtcgtcccctgcaaacgggggcgattttcctccatttgcctcagtggctgcgtttcatgtaagcttacatgacagcgcccgacaagatcctgatactctttggtattcaaccgtttccagtgtaactcgtcgtcactaacattgcgtacagcgcgggctggcgtacccatcaacaactggcgtttctcgccgcgaaagcccgctttgacaaagctcatggcggcaacaatgctctcttcgccaatgaccgcgccatccataatcacgctgttcatcccgaccaatgcatcgcgaccaatcaaacaaccatgcaggatcgctccgtgcccgatatggccgttttccccaacgatagtgtcagtgtcgcagtagccatgcataatgcagccatcctgaatattggctcccgcttgcacgatcaaccgcccgtagtcaccacgcagactggcgagtgggccgatgtagacaccggctcccacaatcacatcgccaatcaagacggcactgggatggacaaacgccgtcgggtgaaccaccggaattaacccctcaaaggcgtaatagctcacggttgttaacgtcctttccacaccggatcgcgcttctcggcaaacgccagcggcccttcaatggcatcttcgctatgcagaacgcttggatagtgtttcaacacgccgctgcgaatatagcgatacgcttcttctaccggcatttcgctggtggtgcggtagatctctttcagcgccgcaatcgccagcggggcgctgttaaccagctgctgagccagttcgcgggcgttatccatcagttccgcctggctaaccacgcggttgactatcccccaacgcagcgcctcttctgcgcccattcgtctgccggtcatcaccatttcattgacgatggcaggcggcaggatcttcggcagacgcagcacaccgccgctgtcaggaacgatgcccagtttggcttccggcagggcgaagctggcgttatcggcacaaacaataaaatctgccgccagcgccagttcaaagccgccgccaaaggcatagccgttcacagctgcgataaccggtttgtcgagattgaaaatttcggttaatcccgcaaaaccacccggaccaaagtcagcatccggtgcttcgccttctgctgccgcttttaaatcccagcccgcggaaaagaacttctctccggcaccggtaataatggcgacacgtaattgcggatcgtcacggaaatttagaaatacttcgcccatttcaaagctggtttttgcatcaatagcattcgcttttggacgatcaagggtaatttccagaatacttccattgcgggtcagatgtaaactttcactcattccttttctccatttttgctttttcagggagctcaacatccctgcaaaaaatgcatattgttttagagtgtgattattagctggcagggtagttccctgctgtttcatttatttcagattctttctaattattttcccgctgcaattacgtggcagatcttttctgatctccagataagagggcactttaaatttcgccatattttgttcgcagaagcggaaaaattcctcttcgctcaatgtttcaccttcattcagcaccacaaatgctttgatggcttcatcgcgaatgctatctttaatacccacaaccacgatgtcctgaattttcgggtgcgcggcgataatattttccagctccacgcaggagacattctcgccgccacgtttaatcatattgcagcggcgatcgacgaaataaaaaaagtcctcttcgtcgcggtatccggtatcgccggtatgcagccagccatcggcttccagcactttcgcagtggcttgtgggttgagaaagtactctttgaagatggttttcccaggtatgcctttaatgcagatttcaccgatctcaccagccgggagcgggcgattgtgatcgtcgcggatctccgcttcgtagcaaaaccccacccgaccaatgctcggccagcgtcgtttatcgccaggacgatcgccgataatgcccacaatggtttccgtcatcccataagacgtcagcaagcgaacgccgaagcgttcacaaaacgcatctttttcctgctcgctcaagttgagataaaacatcacttcccgcaggcggtgttgctgatcgttcgcactaggcggctgtaccatcaacgtacggatcatcatcggaatacattcggtaacggtggcgcggtacttctgtacctgtccccagaaggcgcgggcgctgtatttctcgaccagcacaaaggtggccccggcagaaaacgccgccatcgccgcagtacactggcaatcgatatgaaacgcaggcattaccgtcaggtagacgtcatcgtcacgcagtgcacactgccaggcggagtaatatccagcgaagcgcaggttgtaatgggtaatcaccacacctttcggtcgggaggtggtgccggaggtgaagagaatttccgccgtatcgtcagtgcttagcggcggtgcatagcacaaggtggcaggttgttgatttttcagttgagtaaagctactcacgccatcatcagcgggaagtgccacatctgtcaggcaaatgtgccgcaattgagtggcatcttcctgctgaatctgttgatacataggatagaattgcgcactggtcaccagcaggcacgcctggctattttgcaggatccacgcgctttccttgcacaacaggcgggcgttaatcggcaccataatcgcgccaatttttgccagcccgaaccagcaaaagataaattccgggcagttgtcgagatgtagtgcaaccttgtcgcctttgcgaatccccagcgtataaaacaggtttgccgtgcggttaatctcctgatttaactcaagataactataccggttaacgactccgccgctggattcacaaatcagcgccgttttatgaccgtaaacgtccgcaagatcgtcccacatttgacgtagatgttgtccgccaatgatatccattgcacctctatccatttttgttcgtttgttattgggcgggcgctagtcaggcaagccgactgacgccacgcgtttagtcctcaactttggccagacctttgctgaccaactcctgaatgtcgttttcgctgtagccgatatttttcaaaatggcagccgtgtccataccatgactgggcattccgcgccagatttgtccggggttatttttgaatttcggcatgatgttcggccctttgcaggtgcgaccatccatcgtttgccactgagtgatactttcgcgagccacatactgtggattgctttccagttccggtacggtcagcactttggcgcaggcgatattcagttcagcaaagcgttcttttacttccgcgatggtatgtgtcgccagccaggcatcgagtttctcttcaaccagtgggccgtaagggcattcgatacggtggataagctgagtgccttccgggatttctggcgtgccaagcagatgtgcgaggccaatatctttaaagcactcttcaatttgggtaatgcccaccagttccatcacgatgtagccgtcggcacatttatacagaccgcaaccggcgtagtagggatctttacctttgctcatgcgcgggcacatttcgccgccgttgaagtaatccatcatgaagtactggcccatacgcagcatcacttcatacatggcgatgtcgatactttcgcctttaccggtttcacgcactttatgcagtgctgccagcgccgccgtggtggcggtcaggccagaaaagtaatcggcggtatacgggaaggcaggcattggctggtcaacatcaccgttctgaatcaggtaaccactaaaggcctgggcgatagtgttataggccggaagattggtgtactcctcggtgccgtactgaccaaaaccggacaggtgagcgataaccagtttcgggttgtgctgccacagtacttcatcggtaatgccacgacgggcaaaggccggacctttactggcttcgatgaagatatcggtggtttccattaatttcagaaacgcttcgcggccttcatctttgaaaatatttaagctcagcgcgtgcaaattgcggcgggagagttgcgggtagttcggttgaacgcgaatggtgtcggcccaggcgacgttctcgatccagataacttccgcgccccattctgcgaacatttgcccggcaaacggtccggcgatttcgataccggagaagacaacgcgcaatccggccaacggcccgaatttcggcatgggtagatgatccattatttgctcctgaaaaatttatgtagcgcatgactgccggatgcggcgtaaacgctttatccggcctacattcgtgctcccgtaggcctgataagacgcatcagcgtcgcatcaggcagcgcacggacttagcggtattgcttcagcaccgcacgacccagcgtcaggatctgcatttcgtcagatcccccggagacgcggtctacacgcagatcacgccagaagcggctgatgcggtggttgcccgcaatcccgacaccgcccagcacctgcattgcgctatccacaacttcaaatgccgcattggcgcagaagtatttgcacatcgctgcatcgccagaggtgatggtgccgttgtctgctttccacgctgcttcatacagcatgtttttcatggagtttaatttgatcgccatgtgggcgaatttttcctgaatcaactggaaacgaccaatagcctcgccaaactgcacgcgctgattggcgtagcgcgccgcatcttcaaaggcgcacatcgccgtaccgtagttggtgagggctaccaggaaacgttcatggtcgaactcttctttgacgcggttaaagccgttaccttcccgaccgaacatgtctttctcgtccagttccacgtcgtcaaaggtgatttcacagcagctatccatacgcagaccgagcttttcaagtttggtcactttgatgcccggtttgctcatatcaacaaaccattcggtgtagacaggtttgtccggagaagccccgtcgcgcgccatcaccacgatgtacggggtgtaggcgctgctggtaataaaacacttactaccattaagataaatcttaccatttctacgggtataagtcgttttcaggctacccacgtcggagcccgcgcccggttcggtaatcgcactgttccacatctgcttaccggtgccgcggaaagccataattttgtcgatctgctcttgtgtgccttcgcgcaggaaggtgttgaacccgcccggcaactggtacagcacataggttggtgcccccagacgtcccagctccatccacacggcggcgagagtaacaaaccccgcgtccagaccaccgtgctcttcagggatcagcagactgtcgatacccatatccgccagtgctttgacaaaacgttccgggtagacgctgtcacggtcgcactcggcaaaataggcctcccagttttcgctggccatcagttcgcggataccggcgacaaacagttcctgctcatcatttaaattaaaatccatctttcaacctcttgatattttgggggttaattaatctttccagttctgtttcgcgtctttaataaaggagagcgtcaccataatgttgacgaagaacagcgggcatcctccggcgataatggcggtttgaatcggtttcaggccgccgagcgccagcagaacaataccgataatgccaaccagaatactccaaccgatacgcaccagcagaggtggttcttcaccatcgcgtacttcgcggcaagtggacatcgccagggtataagagcaggcgttaaccagcgtaacggtggcaataaagcagaggatgaagaagccccacatggtggcggtgctgagtggcagagcggcccaggtttcaatgatggcgcgcgccacaccgtactgttcgatcagatttggaatgttgatgatgtttttatctatcaacagcagagtgttactaccgagtacagtccacaggatccaggtactcgctgtcagccccagcaccatgccgaagcacagttcacgcacagtacgaccacgggagatgcgggcgaggaagatactcatctggatagcataaatcacccaccatgcccagtagaacacggtccagccctgcgggaagccgcctttagcgatgggatcggtatagaacaacatgcgcggcagatacatcagcaacatccccacgctatcggtgaagtagttcatgatgaagctggcaccgctgacaatgaacacccaacccagcatcaggaagctcaggtaactacgcacgtcactggcgatacgtacccctttttgcagaccgcaagcgacgcaaatggcgttgaggataatccagcaggtaatgatgatagcgtccagttgcagggtatgcggaatgccaaacaaccattgcatacactcggtcaccagcggcgtggcaaggcccagactggtacccatcgcgaagatcaaggcgacgagatagaagttgtcgacgatagtgccgaacaaccctttggcgtgtttttcacctaccagcggcaccagtgtgctgctggggcgaatcacttccattttgcggacaaagaagaagtaagcgaaggcgacactaaggaagctgtaagtggcccacggcagaggtccccagtggaacaagctgtaagccagccccaactctttcgcccctgtgctgttcggttctaagccaaacggcggggtggagatgtagtagtagatctcaatgcttccccagaacagtacggcagcagacgtacaggaggcgaacatcataaagatccaactggcggtgctaaattctggcggttcgttacctaaacgctttttggcatacgggccaaacaccagccagaaccaaccgaaaagcatcaccaccatataccattcaaatgcccatccccatacattggtgacgtaactgaatacagcattaataacgacattcgctgcatccagatctctgactgtaagccaacaaagtatgccgacgattattaacggcggaaagaaaaccttcggttctattcccgtttttctcttttcattcttcatgagttaattccactgtgaaaacgaatatttattttgcgttcccgtttgttttatttttgttaacatttaatataattattattaacctcgtggacgcgttaatggctaactcataatgggtattcaataagctgtattctgtgattggtatcacatttttgtttcgggtgaatagagggcgttttttcgttaattttgattaataatcagtttgttatgctctgttgtgagtaaaaaataacatctgactttcaatattggtgatccataaaacaatattgaaaatttctttttgctacgccgtgttttcaatattggtgaggaacttaacaatattgaaagttggatttatctgcgtgtgacattttcaatattggtgattaaagttttatttcaaaattaaagggcgtgatatctgtaattaacaccaccgatatgaacgacgtttccttcatgatttctggagatgcaatgaagattattacttgctataagtgcgtgcctgatgaacaggatattgcggtcaataatgctgatggtagtttagacttcagcaaagccgatgccaaaataagccaatacgatctcaacgctattgaagcggcttgccagctaaagcaacaggcagcagaggcgcaggtgacagccttaagtgtgggcggtaaagccctgaccaacgccaaagggcgtaaagatgtgctaagccgcggcccggatgaactgattgtggtgattgatgaccagttcgagcaggcactgccgcaacaaacggcgagcgcactggctgcagccgcccagaaagcaggctttgatctgatcctctgtggcgatggttcttccgacctttatgcccagcaggttggtctgctggtgggcgaaatcctcaatattccggcagttaacggcgtcagcaaaattatctccctgacggcagataccctcaccgttgagcgcgaactggaagatgaaaccgaaaccttaagcattccgctgcctgcggttgttgctgtttccactgatatcaactccccacaaattcctagcatgaaagccattctcggcgcggcgaaaaagcccgtccaggtatggagcgcggcggatattggttttaacgcagaggcagcctggagtgaacaacaggttgccgcgccgaaacagcgcgaacgtcagcgcatcgtgattgaaggcgacggcgaagaacagatcgccgcatttgctgaaaatcttcgcaaagtcatttaattacaggggatgctatgaacacgttttctcaagtctgggtattcagcgataccccttctcgtctgccggaactgatgaacggtgcgcaggctttagctaatcaaatcaacacctttgtcctcaatgatgccgacggcgcacaggcaatccagctcggcgctaatcatgtctggaaattaaacggcaaaccggacgatcggatgatcgaagattacgccggtgtcatggctgacactattcgccagcacggcgcagacggcctggtgctgctgccaaacacccgtcgcggcaaattactggcggcaaaactgggttatcgccttaaagcggcggtgtctaacgatgccagcaccgtcagcgtacaggacggtaaagcgacagtgaaacacatggtttacggtggtctggcgattggcgaagaacgcattgccacgccgtatgcggtactgaccatcagcagcggcacgttcgatgcggctcagccagacgcgagtcgcactggcgaaacgcacaccgtggagtggcaggctccggctgtggcgattacccgcacggcaacccaggcgcgccagagcaacagcgtcgatctcgacaaagcccgtctggtggtcagcgtcggtcgcggtattggcagcaaagagaacattgcgctggcagaacagctttgcaaggcgataggtgcggagttggcctgttctcgtccggtggcggaaaacgaaaaatggatggagcacgaacgctatgtcggtatctccaacctgatgctgaaacctgaactgtacctggcggtggggatctccgggcagatccagcacatggttggcgctaacgcgagccaaaccattttcgccatcaataaagataaaaatgcgccgatcttccagtacgcggattacggcattgttggcgacgccgtgaagatccttccggcgctgaccgcagctttagcgcgttgatccactctggcagggctgcattttggccctgccgctgacagggagctcttatgtccgaagatatctttgacgccatcatcgtcggtgcagggcttgccggtagcgttgccgcactggtgctcgcccgcgaaggtgcgcaagtgttagttatcgagcgtggcaattccgcaggtgccaagaacgtcaccggcgggcgtctctatgcccacagtctggaacacattattcctggtttcgccgactccgcccccgtagaacgcctgatcacccatgaaaaactcgcgtttatgacggaaaagagtgcgatgactatggactactgcaatggtgacgaaaccagcccatcccagcgttcttactccgttttgcgcagtaaatttgatgcctggctgatggagcaggccgaagaagcgggcgcgcagttaattaccgggatccgcgtcgataacctcgtacagcgcgatggcaaagtcgtcggtgtagaagccgatggcgatgtgattgaagcgaaaacggtgatccttgctgatggggtgaactccatccttgccgaaaaattggggatggcaaaacgcgtcaaaccgacggatgtggcggttggcgtgaaggaactgatcgagttaccgaagagcgttattgaagaccgttttcagttgcagggtaatcagggggcggcttgcctgtttgcgggaagtcccaccgatggcctgatgggcggcggcttcctttataccaatgaaaacaccctgagcctggggctggtttgtggtttgcatcatctgcatgacgcgaaaaaaagcgtgccgcaaatgctggaagatttcaaacagcatccggccgttgcaccgctgatcgcgggcggcaagctggtggaatattccgctcacgtagtgccggaagcaggcatcaacatgctgccggagttggttggtgacggcgtattgattgccggtgatgccgccggaatgtgtatgaacctcggttttaccattcgcggtatggatctggcgattgccgccggggaagccgcagcaaaaaccgtgcttagtgcgatgaaaagcgacgatttcagtaagcaaaaactggcggaatatcgtcagcatcttgagagtggtccgctgcgcgatatgcgtatgtaccagaaactaccggcgttccttgataacccacgcatgtttagcggctacccggagctggcggtgggtgtggcgcgtgacctgttcaccattgatggcagcgcgccggaactgatgcgcaagaaaatcctccgccacggcaagaaagtgggcttcatcaatctaatcaaggatggcatgaaaggagtgaccgttttatgacttctcccgtcaatgtggacgtcaaactgggcgtcaataaattcaatgtcgatgaagagcatccgcacattgttgtgaaggccgatgctgataaacaggcgctggagctgctggtgaaagcgtgccccgcaggtctgtacaagaagcaggatgacggcagtgtgcgcttcgattacgccggatgtctggagtgcggcacctgtcgcattctggggctggggagcgcgctggaacagtgggaatacccgcgcggcacctttggtgtggagttccgttacggctgatgttggtttgatacgtaacgccgcactgactctcattgcaaaaaacaggaataaccatgcaaccgtccagaaactttgacgatctcaaattctcctctattcaccgccgcattttgctgtggggaagcggtggtccgtttctggatggttatgtactggtaatgattggcgtggcgctggagcaactgacgccggcgctgaaactggacgctgactggattggcttgctgggcgcgggaacgctcgccgggctgttcgttggcacaagcctgtttggttatatttccgataaagtcggacggcgcaaaatgttcctcattgatatcatcgccatcggcgtgataagcgtggcgacgatgtttgttagttcccccgtcgaactgttggtgatgcgggtacttatcggcattgtcatcggtgcagattatcccatcgccaccagtatgatcaccgagttctccagtacccgtcagcgggcgttttccatcagctttattgccgcgatgtggtatgtcggcgcgacctgtgccgatctggtcggctactggctttatgatgtggaaggcggctggcgctggatgctgggtagcgcggcgatcccctgtttgttgattttgattggtcgattcgaactgcctgaatctccccgctggttattacgcaaagggcgagtaaaagagtgcgaagagatgatgatcaaactgtttggcgaaccggtggctttcgatgaagagcagccgcagcaaacccgttttcgcgatctgtttaatcgccgccattttccttttgttctgtttgttgccgccatctggacctgccaggtgatcccaatgttcgccatttacacctttggcccgcaaatcgttggtttgttgggattgggggttggcaaaaacgcggcactagggaatgtggtgattagcctgttctttatgctcggctgtattccgccgatgctgtggttaaacactgccggacggcgtccattgttgattggcagctttgccatgatgacgctggcgctggcggttttggggctaatcccggatatggggatctggctggtagtgatggcctttgcggtgtatgcctttttctctggcgggccgggtaatttgcagtggctctatcctaatgaactcttcccgacagatatccgcgcctctgccgtgggcgtgattatgtccttaagtcgtattggcaccattgttagcacctgggcactaccgatctttatcaataattacggtatcagtaacacgatgctaatgggggcgggtatcagcctgtttggcttgttgatttccgtagcgtttgccccggagactcgagggatgagtctggcgcagaccagcaatatgacgatccgcgggcagagaatggggtaaattgttcagatttctctcttttctgaatcaatattattgactataagccgcgtgaatatatgactacactttgtgggaaaacaaaggcgtaatcacgcgggctacctatgattcttataatttatgcgcatccgtatccgcatcattcccatgcgaataaacggatgcttgaacaggcaaggacgctggaaggcgtcgaaattcgctctctttatcaactctatcctgacttcaatatcgatattgccgccgagcaggaggcgctgtctcgcgccgatctgatcgtctggcagcatccgatgcagtggtacagcattcctccgctcctcaaactttggatcgataaagttttctcccacggctgggcttacggtcatggcggcacggcgctgcatggcaaacatttgctgtgggcggtgacgaccggcggcggggaaagccattttgaaattggtgcgcatccgggctttgatgtgctgagccagccgctacaggcgacggcaatctactgcgggctgaactggctgccaccgtttgccatgcactgcacctttatttgtgacgacgaaaccctcgaagggcaggcgcgtcactataagcaacgtctgctggaatggcaggaggcccatcatggataattaaggaatggcaggaggcccatcatggatagccatacgctgattcaggcgctgatttatctcggtagcgcagcgctgattgtacccattgcggtacgtcttggtctgggaagcgtacttggctacctgatcgccggctgcattattggcccgtgggggctgcgactggtgaccgatgccgaatctattctgcactttgccgagattggggtggtgctgatgctgtttattatcggcctcgaactcgatccacaaaggctgtggaagctgcgtgcggcagtgttcggctgtggcgcattgcagatggtgatttgcggcggcctgctggggctgttctgcatgttacttgggctgcgctggcaggtcgcggaattgatcggcatgacgctggcgctctcctctacggcgattgccatgcaggcgatgaatgaacgcaatctgatggtgacgcaaatgggtcgcagtgcctttgcggtgctgctgttccaggatatcgcggcgatcccgctggtggcgatgattccgctactggcaacgagcagtgccagcacgacgatgggcgcatttgctctcagcgcgttaaaagtggcgggtgcgctggtgctggtggtattgctggggcgctatgtcacgcgtccggcgctgcgttttgtagcccgctctggcttgcgggaagtgtttagtgccgtggcgttattcctcgtgtttggctttggtttgctgctggaagaggtcggcttgagcatggcgatgggcgcgtttctggcgggcgtactgctggcaagcagcgaataccgtcatgcgctggagagcgatatcgaaccatttaaaggtttgctgttggggctgtttttcatcggtgttggcatgagcatagactttggcacgctgcttgaaaacccattgcgcattgtcattttgctgctcggtttcctcatcatcaaaatcgccatgctgtggctgattgcccgaccgttgcaagtgccaaataaacagcgtcgttggtttgcggtgttgttagggcagggcagtgagtttgcctttgtggtatttggcgcggcgcagatggcgaatgtgctggagccggagtgggcgaaaagcctgaccctggcggtggcgctgagcatggcagcaacgccgattctgctggtgatcctcaatcgccttgagcaatcttctactgaggaagcgcgtgaagccgatgagatcgacgaagaacagccgcgcgtgattatcgccggattcggtcgttttgggcagattaccggacgtttactgctctccagcggggtgaaaatggtggtactcgatcacgatccggaccatatcgaaaccttgcgtaaatttggtatgaaagtgttttatggcgatgccacgcggatggatttactggaatctgccggagcggcgaaagcggaagtgctgattaacgccatcgacgatccgcaaaccaacctgcaactgacagagatggtgaaagaacatttcccgcatttgcagattattgcccgcgcccgcgatgtcgaccactacattcgtttgcgtcaggcaggcgttgaaaagccggagcgtgaaaccttcgaaggtgcgctgaaaaccgggcgtctggcactggaaagtttaggtctggggccgtatgaagcgcgagaacgtgccgatgtgttccgccgctttaatattcagatggtggaagagatggcaatggttgagaacgacaccaaagcccgcgcggcggtctataaacgcaccagcgcgatgttaagtgagatcattaccgaggaccgcgaacatctgagtttaattcaacgacatggctggcagggaaccgaagaaggtaaacataccggcaacatggcggatgaaccggaaacgaaacccagttcctaataaagagtgacgtaaatcacactttacagctaactgtttgtttttgtttcattgtaatgcggcgagtccagggagagagcgtggactcgccagcagaatataaaattttcctcaacatcatcctcgcaccagtcgacgacggtttacgctttacgtatagtggcgacaattttttttatcgggaaatctcaatgatcagtctgattgcggcgttagcggtagatcgcgttatcggcatggaaaacgccatgccgtggaacctgcctgccgatctcgcctggtttaaacgcaacaccttaaataaacccgtgattatgggccgccatacctgggaaagtatcggtcgtccgttgccaggacgcaaaaatattatcctcagcagtcaaccgggtacggacgatcgcgtaacgtgggtgaagagcgtggatgaagccatcgcggcgtgtggtgacgtaccagaaatcatggtgattggcggcggtcgcgtttatgaacagttcttgccaaaagcgcaaaaactgtatctgacgcatatcgacgcagaagtggaaggcgacacccatttcccggattacgagccggatgactgggaaagcgtattcagcgaattccacgatgctgatgcgcagaactctcacagctattgctttgagattctggagcggcggtaattttgtatagaatttacggctagcgccggatgcgacgccggtcgcgtcttatccggccttcctatatcaggctgtgtttaagacgccgccgcttcgcccaaatccttatgccggttgctcggctggacaaaatactgtttatcttcccagcgcaggcaggttaatgtaccaccccagcagcagccggtatccagcgcgtatataccttccggcgtacctttgccctccaggcttgcccagtgaccaaaggcgatgctgtattcttcagcgacagggccaggaatcgcaaaccacggtttcagtggggcaggggcctcttccgggctttctttgctgtacatatccagttgaccgttcgggaagcaaaaacgcatacgggtaaaagcgttggtgataaaacgcagtcttcccagcccccgcaattccggactccagttatttggcatatcgccgtacatggcatcaagaaagaagggataggagtcactgcttagcaccgcttctacatcgcgtgcgcactctttggcggtctgcagatcccactgcggcgtgatccctgcgtgggccatcaccagctttttctcttcgtcgatttgcagcagaggctggcgccgcagccagttaagcagctcgtcggcatccggcgcttccagcagcggtgtcaggcgatctttcggtttattgcggctgatcccggcaaataccgccagcagatgcagatcgtgattgcccagcaccagacgtacgctgtcgcctaaggatttcacatagcgcagaacatccaggctacccggcccgcgcgcgaccagatcgcccgtcagccagagggtatctttcccaggggtaaattctactttatgcagcaatgcgatcagttcatcgtaacaaccatgaacgtcgccaataaggtatgtcgccatattcttttaatgaatgagtgtgggaacggcgagtcggaatacgggaatgtcgatgctgaaagggacgccattttcatcgatcatttcgtagtgaccctgcatggtgcccagcggggtttcaatgattgcaccgctggtgtactggtactcttcgccaggcgcgataagtggctggacgccaaccactccttcgccctggacttcggtttcacggccattgccattggtgatcagccagtaacgccccaacaactgcactggcgctcgccccagattgcgtatggttacggtataagcaaaaacgtaacgttcattatcaggactagattgagcctcaatgtagacgctttgaacctgaatacacactcgggggctattgatcatcgttaactctcctgcaaaggcgcgttctccgccagatagttcgccatctggcaatattgcgcgacagagatattttccgctcgcatcgccgggtcgatccccattcccgttaacacctcgacgctaaacaggttgccgaggctgttacgaatggttttacgacgctggttaaaggcttcggtggtgatgcggctcaacacacgaacatctttaaccgggtgaggcatcgttgcatgaggaaccaggcgcacgacggcggaatccactttgggtggtggtgtaaaggcactcggcggtacttccagtaccgggatcacattgcaatagtattgcgccatgacgcttaatcgaccatacgctttgctgttcggtcctgcaaccagacgattcaccacctctttttgcaacataaagtgcatgtcggcaatggcatcagtatagctaaacagatggaacatcaacggcgtggagatgttataaggcaggttgccgaaaacacgcagcggctgacccattttctcggccagttcaccaaagttaaaggtcatcgcatcctgctgataaatcgtcagtttcgggcctaagaatggatgcgtttgcagacgtgccgccagatcgcggtcaagttcgatgaccgtcagctggtccagacgttcgccgaccggttcggtcaatgccgccagaccggggccgatttcgaccatcgcctggcccttttgcgggttaatggcagacacaatactgtcgatcacgaactgatcgttgagaaagttttgcccgaagcgtttacgggctaagtggccctggtggactcgattattcattgggtgttaacaatcattttgatggcgagattaagcgccgtaataaaactgccggcatcggctttgccacgtcccgccagttcaagcgcggtgccgtggtccacacttgtgcgaataaagggcaggcccagcgtaatgttcacaccgcgcccgaagccctggtattttagcacgggaagaccctgatcgtggtacatcgccagcacggcgtcggcgttatcaagatatttcggctgaaacagggtatcggcaggcagcggcccgttgagtttcatcccctgcgcccgcagctcattgagcaccggaataatggtgtctatctcttccgtacccatatgaccgccttcgcccgcgtgcggattcagcccgcagaccagaatgcgcggttcggcaataccaaatttggtccgcaaatcgtgatgcaaaatagcaatcacttcgtgcaaaagtgcaggggtgatagcgtctgcgatatcgcgcagcggtaaatgcgtcgttgccagcgccacgcgaagttcttcggtcgccagcatcatcaccacctttttcgcctggctacgctcttcgaaaaactcggtatgaccggtaaaaggaatgccagcgtcgttaataacgcctttatgcaccggacctgtgatcagcgcggcaaattcgccgttcagacaaccatcgcacgctcgcgccagcgtttccaccacataatgcccattttcaaccgctaactgccccgcagtgacaggtgcacgtagcgcgacaggaagtagcgttaatgtgcccgcagtttgcggttgtgcaggggagttgggggaataagggcggagggtgagcggcaaaccgagcatcgctgcccggttggtaaggagagtggcatcggcacaaacaaccagttcgaccggccactcacgctgtgcaagctggacaactaagtccgggccaatcccggcgggctcgccgggagtgatcacaacacgttgggttttaaccattagttgctcaggattttaacgtaggcgctggcacgttgttcctgcatccagcttgctgcttcttcgctgaacttacggttcatcagcatgcggtatgcacgatctttctgcgcagcgtcggttttatcgacattacgggtatccagcagttcgattaaatgccagccgaaactagagtgaaccggtgcactcatttgacctttgttcaggcgagtcagggcgtcacggaaggccggatcgaaaatatctggtgtagcccagccgagatcgccgccctggttagcagagcctggatcctgagagaactctttcgctgcggcagcaaaagtcgttttaccactcttgatatcagcagcaatctgttccagtttcacacgggcctgttcgtcagtcatgatcgggctcggtttcagcagaatatggcgagcatgaacttcggtcacgctgatatttttgctttcgccgcgcaggtcgttaactttcagaatatggaagccaacgccggaacgaatcgggccaacaatgtcgcctttcttcgcggtgcttaatgcctgggcgaagatcccgggcaactcctgaatacggccccagcccatctggccgccgttcagcgcctgctggtcggcagaatgagcaatcgccagcttaccgaaatcagcgccgttacgcgcctgatcgacaatggcgcgcgcctggctttccgcttcgttcacctgatcagaggtcgggttttccggcagcgggatcaggatgtggctcaggttcagctcagtgctggcgtcgttttggttacccacctgctgcgccagggattcgacttcctgcggcaggatggtgatgcgacgacgcacctcgttgttacgcacttcagagataatcatctctttgcggatctggttacgataggtgttgtagttcagtccatcgtaagccagacggctgcgcatctgatccagcgtcatgttgttctgtttcgcgatgttagcaatcgcctgatccagctgctcatcggagattttcactcccattttctgccccatctgcaggatgatttgatccatgatcaaacgttccatgatttggtggcgcagcgtcgcgtcatcaggaagttgctgccttgcctgagcagcgttcagttttacgctctgcattaatccatcaacgtcgctttccagcacgacgccgttattgacgacggctgcgactttatcgactacctggggggcagcgaaactggtattcgcgatcatggcgataccgagaagcagcgttttccagttcttcatactttttccatttcaattaaccgcactgcggattacgtggtaaatcaacaaatcacaaagtgttttgatacggcagaatgttgctacgcagcatctcttgcgtacccagaccgtagttggagctcaggccgcgaagttcgatgttaaagccgattgcgttgtcatataccgcatgttgtttatcgttatcccaaccgttcagcttccgctcgtaaccgacgcgaattgcatagcagcaggagctgtattgcacacctaacatagagtcggcttgcttgttagcattggtgtcgtagtagtaggccccaacaatggaccaacgatcggcaattggccagctggcgacagcacctacctggctaataccattcttatattgctcagcagtggaatagtacttaggcagcgtagcctgaatatattccgggctggcgtaacggtaattcagctgtaccagacggtcttcatcccgacggtattcaatgctggagttactggtcgctacgttatccagacgtgtatcgtactgaatcccgccacgcaatccccaacgctcggagatacgccagtaagtatcgcctgcccacaccagactacccgttttgtcgtcattctcccatgttatgttgtcatcgccagtgcgagactccgtgaaatagtagatttgaccaacggaaatattaaaacgttcaacggcagcatcatcatatatgcgagatgtgacaccggtcgtcacctggttagcggaggcaatacggtcaagaccgccgtaagtccggtcccggaacaggccagagtagtcagattgcagcagagagctgtcgtagttatagatgtcgctctgatcgcgatacggcacgtacaaatactgcgcgcgcggttccagcgtttgggtataacccggagccagcatttccatatcgcgttcaaagaccattttgccgtcaactttgaattgcggcattacgcggttaacggattcgtccagcttggtcgtgtttctggagttataccagtcaagattggtttgctgataatgggttgccagcaacttcgcttcggtattgatgctgccccagttattagagagcggcaaattgatggtcggttccaggtgaacacgggttgcttcaggcatgtcgtctctggtgttaacaaagtgcactgcctggccgtaaatacgcgtatcaaacggaccaacatcattctggtagtaattaacgtctaactgcggctctgcgctgtagctactggtgttctgttcgctgaaaacctggaactgcttggtactaacggtggcattgaagttttgcaccgcatagccaacgctgaatttttgcgttgcgtagccgtcagtactggaaccgtacttgttatcgaaatcattgaagtagctaggatcgctgaccttggtgtagtcgacgttgaaacgccacacctgatccatgaccccggagtggttccagtagaataaccaacgacgactactgtcatcgttcgggtgttcatcttcatagactttatcactaggcagatagtccagttccatcaagccagcgcccgcctgggagaggtagcggaattcgttctcccacatgatgttgccacgacgatgcatataatgcggcgtgatggtggcatccatatttggcgcgatgttccagtaatatggcaggtagaactcaaagtagttggtggtggtgtacttggcgttcgggatcaagaaaccagagcgacgtttgtcacccaccggcaactgcaaataggggctataaaagatcggtaccggacccaccttaaagcgggcgttccagatctccgcaacttgttcttcgcggtcatgaataatttcgctacctaccacgctccaggtgtcagaacccggcagacaggaggtaaagctaccgttatccagaatggtatagcggttttcgccacgttgtttcatcaggtccgctttaccgcgaccctggcgacccaccatctggtaatcaccttcccagacgttggtatctttggtgttcagattcgcccagcctttcggccctttgaggatcacctggttatcgtcgtaatggacattaccgagcgcatcaacggtacgtaccggctccggttgtcctggtgcctctttttgatggagctgcacttcgtcggcctgcagacggctgttaccctgcatgatatccacgctgccagtaaacacggcgtcatccgggtagtcccctttcgcgtggtcagcattgatagtcacgggtaagtcattggtatcgccctgtaccagaggacggtcatagcttggcacgcccaacatgcactgactggcgaggtcggctgccagtccctgttgactataaagggcggtggcaatcatggtggccaggagagtggggatacgttttttcatacgttgattttattgttccatcatcggtaacgttgcgcgtgacaaacggtcagagactaacgtactcgtcatctctacgctagtgttaatcctgtccgaatagcgtcagtggtgttaggcacggcattgaatgacaggtatgataatgcaaattataggcgatgtcccacaattgaccgcagccggaaaacggtaaaagcacctttatattgtgggagatagccctgatatccgtgtgtcgatttggggaatatatgcagtattggggaaaaatcattggcgtggccgtggccttactgatgggcggcggcttttggggcgtagtgttaggcctgttaattggccatatgtttgataaagcccgtagccgtaaaatggcgtggttcgccaaccagcgtgagcgtcaggcgctgttttttgccaccacttttgaagtgatggggcatttaaccaaatccaaaggtcgcgtcacggaggctgatattcatatcgccagccagttgatggaccgaatgaatcttcatggcgcttcccgtactgcggcgcaaaatgcgttccgggtgggaaaaagtgacaattacccgctgcgcgaaaagatgcgccagtttcgcagtgtctgctttggtcgttttgacttaattcgtatgtttctggagatccagattcaggcggcgtttgctgatggtagtctgcacccgaatgaacgggcggtgctgtatgtcattgcagaagaattagggatctcccgcgctcagtttgaccagtttttgcgcatgatgcagggcggtgcacagtttggcggcggttatcagcagcaaactggcggtggtaactggcagcaagcgcagcgtggcccaacgctggaagatgcctgtaatgtgctgggcgtgaagccgacggatgatgcgaccaccatcaaacgtgcctaccgtaagctgatgagtgaacaccatcccgataagctggtggcgaaaggtttgccgcctgagatgatggagatggcgaagcagaaagcgcaggaaattcagcaggcatatgagctgataaagcagcagaaagggtttaaatgaccctgtaaatgatgctgagtaactgcccacgattaaaggtggccgccctggcggtcacttctttgagaaaaggcgtttactcagaatggtggacaggctcaatgcacgatttacgggaggggttctgtaggttttatcgcgttgaccctgcttaaggttgagagctttacgacgagcggaattatatttttacgtcttaaaaataaaaaacacatacctgaatgagcgatttttgaaagtatatttattcagaacgcgcatcatgagtttttaactcaatgcgaggctattaccatgaaagtaagtgttccaggcatgccggttacacttttaaatatgagcaagaacgatatttataagatggtgagcggggacaagatggacgtgaagatgaatatctttcaacgcttgtgggagacgttacgccatctgttctggagtgataaacagactgaggcttataaacttctgttcaatttcgtgaataaccagactggcaacatcaacgccagtgaatactttactggggctatcaacgagaatgagagagaaaagtttatcaatagcctggaattattcaataaacttaaaacatgcgcaaaaaatccggatgagttggtcgcaaagggcaatatgcgctgggtcgcccagaccttcggggatatcgagttaagtgtcactttttcattgaaaagaataagatatgtactcagacgttgcagctgcataagggccaaggtaacttgggcgttgatcttagaaaggcttaccttcccggcgttgacatgagggattgttaccttggtaaaaaaacaatgaaaggtagcaatgatatcctttatgagagacctgggtggaatgctaacctgggcgtgctaccccggacggtgctaccccggacggtgctaacccggacggtgctaacctggacggtgctaccgtgaacggtgctacctccttatatgatgaggtaattattattaataaaatcccccccaaaaaaattgatactaaaggagttgctactgaagaagttgctactaaaaaagtactgctgaacaaattactgacaacgcaattattgaatgagccagaataagctaaggttgaaggggctggaacgccccttcaaccttagcagtagcgtgggatgatttcacaattagaaagacctgcatgatgagctagagaagaggctagtgacgcaaggcgtcgtgcaggacacggatcaccgagatgggcatcgccaaccagactgctaattagcccatgaataacaatcagaaaggaccataacagacccgttaaaatgaaatataagagacggtcaacgggtgaagaaaaagttcaaaaattcgctgtggagcaggaagggaattaccgaatggaaagcgtagccacacgcaacaactgaaagcagtttggcagaaacaaaaaatccccggactcggggatttatgtacaagaggcagcccttaggatgagggtataaacgtacaggaaaggttaaaaatccgctggcgctttaaacgtcatactattgccatacgccggatgggtaatcgtcaacatctctgcatgtagcaacaaacgtggtgccatcgctctcgcttctggacttgcataaaaacgatcgccgagaatcggatgacccagcgccagcatatgcacacgcaattgatggctacgcccggtaatcggttttaacaccactcttgccgtgttatccgccgcatactccaccacttcatattccgtctgcgcaggtttacccgtttcgtaacagactttctgtttcgggcggtttggccagtcgcaaatcagcggcagatccaccagaccttctgcgggggatggatgcccccagacgcgggccacatactgctttttcggctcgcgctcgcggaactggcgttttaactcccgctccgcggctttggtcagcgccactacaatcacgccgctggtagccatatccagacgatgcacgctttctgcctgcggataatcacgctgaatgcgcgtcatcacgctgtctttgtgctcttccagacgacccggcacactcaacaaaccgctcggcttgttgaccaccataatatggtcatcctgatacaggataaccaaccagggttcctgcggtggattgtagttttccatccccattttcggctccgttactgatgcgttacaacgatcaaacgcagggcatccagacgccaacctgcctgatccaggctttccattacctgctgacggttgctctcaatggcggtcagttcgtcgtcacgaatgttcgggttcactgcacgcagagcttccagacgagacagctcggcagacagtttttcgtcggcttcgttacgcgctgcatcaatcaatgcacgggcagatttctcgatctgcgattcacccagttgaaggatagcgtgaacatcctgctgcacggcgttaaccagtttgctgccggtgtgacggttaaccgcgttaagctggcggttaaaggtttcaaactctacctgcgccgccaggttgttgccgtttttatccagcagcatacgtaccggcgtcggtggcaggaagcggttgagctgcaactgcttcggagcctgggcttcaaccacataaatcagttccaccaacagcgtacctaccggcaacgctttgttttttaacagactaatcgtgctgctaccggtatcgccagaaaggatcagatccagaccgttgcggatcagcggatgctcccaggtaataaactgtgcatcttcacgcgccagcgccacttcacgatcaaaggtgatggtgatgccatcttcgctcaggccagggaagtccggcaccagcatatgatcggacggcgtcagcacgatcatgttgtcgccgcgatcgtcctgattgataccgataatatcgaacaggttcatggcgaaggcgatcaggttggtatcgtcatcctgctcttcaatgctttctgccagtgcctgggctttttcgccaccgttggagtggatttccagcaggcggtcacgaccctgttccagctgtgctttcagcgtttcatgttgctcgcggcagtttttgatcagatcgtcaaagccttcggtttgatccggactagccagatagttaatcagatcgttgtatacgctatcgtaaatagtgcgtccggtcgggcaggtgtgctcaaatgcatccagaccttcgtgataccagcgcaccagcacgctctgagcggttttctccagataaggcacatggatctgaatatcgtgcgcctggccgatacgatccagacgaccaatacgctgctccagtagatccgggttgaatggcaggtcaaacatcaccatgtggctggcgaactggaagttacgtccttcagaaccgatttcactgcacagcagtacctgtgcgccggtgtcttcttcggcaaaccaggcggcagcgcggtcacgttcgataatgctcataccttcgtggaacaccgcagcgcgaataccttcacgttcgcgcagtacctgctccagttgcagcgcagtggcagctttggcgcagatcaccagcactttctgagagcgatggctggtcaggtagcccatcagccactcaacgcgcggatcgaagttccaccaggtggcgttatcaccttcaaattcctgataaatacgctccgggtagagcatatcgcgagcacgatcttccgcacttttacgtgcgcccataatgccggagactttaatagccgtctgatactgcgtcggtagcggcagcttaatggtgtgcagctcgcgtttcgggaatcctttcacaccgttacgcgtgttacggaacagcacgcggctggtgccgtggcgatccatcagcatgctaaccagctcctgacgggcgctctgggcatcttcgctgtcgctgtttgctgcctgcaacagcggctcgatatcctgctcgccgatcatctcgccgagcatgttcagttcgtcattgctcagtttgttacctgccagcagcatggcaacggcgtccgcaaccggacgataatttttctgctcttcaacgaactgcgcaaaatcgtggaaacggttcgggtccagcagacgcagacgggcgaagtggctttccatccccagctgttccggggtcgcggtcagcagcagaacgcccggcacgtgctctgccagttgttcaatggcctgatattcacggcttggcgcatcttcgctccacaccaggtgatgcgcttcatcgaccaccagcaggtcccattcggcttcacagagatgttccaggcgctgtttgctacgacgggcaaaatccaggctgcaaatcaccagctgttcggtgtcaaacgggttgtaagcatcgtgctgagcttcggcataacgctcatcatcaaatagcgcaaagcgcaggttgaaacggcgcagcatttctaccagccactgatgctgtaaggtttccgggacgataattagcacacgttcagcagcgccagagagcagttgctgatgcaggatcatcccggcttcaatggttttccctaaacccacttcgtcagccagcaggacgcgcggcgcgtggcggcgaccaacatcatgagcgatgttgagctgatgcgggatcaggctggtacgctgaccgcgcaggccgctgtacggcatacggaactgttcgctggaatatttacgcgcgcgataacgcagcgcaaagcggtccatacggtcaatctgcccggcaaacagacggtcctgcggtttgctgaacaccagtttgctatcaaggaaaacttcacgcagggctacgccggactcttcagtatccaggcgagtaccgatataggtcagcaagccattttcttcttttacttcttcgacttgcatctgccagccgtcatggctggtaatggtatcaccagggttgaacatcacgcgggtcacgggggaatcactgcgtgcgtacagacggttttcaccagtagatgggaaaagtaaagtgacagttcgcgcatccaccgcgacaacggttccaagtcccaattcgctttctgtatcgctgatccagcgttgaccaagtgtaaaaggcatatgtgttcggctctatatctttaattgcaggcaataaccacccgctaccgtgcttatgaggtagtggtgttattcaggtccaggaatggaaagggcgctatggtactggatggcaaagcattcgtcacgcatcaaaatggtatctggcgaactcttttttttgctcaaaatagcccaagttgcccggtcataagtgtagcaaaattatcctcaataaaagggagtattccctccgccacgggttgtagctggcgggtcagatagtgttcgtaatccagtggactacgttggtagtccagcggctccgggccgttggtggtccatacgtacttaatggtgccgcgattctgatattgcaaggggcgaccacgcttttggttttcttcatcggcaaggcgagcggcgcgtacatgaggcggcacattacgctgatactcgctcagcggacggcgaaggcgtttacggtaaaccagtcgcgcatccagttcacccgccatcagtttgtcgatggtttcgcgtacatattcctgatatggctcgttgcggaagatgcgcaggtatagctcctgctgaaactgctgggccagcggcgtccagtcggtgcgcacggtttccagccctttaaacaccatccgctgcttgtcgccctcctgaatcagtccggcataacgctttttactgccggtatcggctccgcgaatggttggcatcagaaaacggcagaaatgggtttcatactccagttctaatgcgctggtcagccgttgtttttgcagcgtttccgcccaccaggcgttaacgtgctgcaccagtgcacgaccgattttcgccgcttcttcttcgctatgtgcgcctttcagccagacaaacgtactgtcggtatcgccgtagataacgtcgtagccctgtgcttcaatcaacgctttggtttgccgcatgatctgatgaccacgcatggtgatgctgcttgccagccgcggatcgaagaagcggcaggcggtggtgccgagcacgccataaaaggcattcatgatgattttcagcgcctggctcagcggtttgttaccctggcgtttggcttcatcgcgcccgtgccagatgttagtcacaatctccggcaggcaatgtttttctcggctgaaccaggcatcgagaaaaccttcggtactgtgctctggatcaggctgcgccatgccttccaccagcccgacgggatcaatcagaaaggtgcggatgatgctcgggtacaggcttttatagtccagcaccagcacactatcataaagccctggccgactatccatcacgtagccgccagggctggcgtgcggcggcacttcgccgagattaggcgcgacataaccagcgcgatgcattcgcggaaaatagagatgaccaaatgccgccacgctaccgccgtgtcggtccaccggcaggccgttcaccgttgcccgttcgagtaaaaatggcatgatttcagttttgtggaagatctgcgtcaccagctcgcaatctttcaggttataagttgccagcgcaggtttatcttcggcgaaacggcggtcaatttcgtccattcgatcccacgggttatcgatagattttccttcgcctaatagctcctgagcgacagtttccaggctgaaactagagaaattccagaacgcggatttcagcgcctcgataccgtcgataattagccgacctttagcctgggcaaaaaagacgccgtttttaaagccgtgctcgcgccactccagctcgctattatcgcgcccaagacgcagcggaagacggtaacgctcggcatgtttttgcagcattcgcagatcgaactgcaccacgttccaaccgatgatcacatcaggatcgtagttggcaaaccaggcgttgagtttttccagcaactgcgggcggctggcgacgtattccagttcgaaatcaaggctggaggcgtcgccattctccggccccagcatataaacgatgcgctgcccgcagccttccaggccgatgcagtacagctcaccgtggcgggtggtttcaatatctatagaaacccacttgagcggcggacgatagtcgggatgcggtttcagacgggcattaacgatagtgccattgtgcatatcaccctcgacccacaccggactggtgataaaccgctccatcagatagcgttctggcggacgcacatcggcctcgtagacggtaacgccaccttcacgcaggcgcttttcgtaattcatcaattggcgatgggcgcgacagtaaaggccatacaccggctggcggtgaaaatcctttaacgccagcggtgtcaggcgaaagccttgttcaccctgcaaaatatgctgagcgcggggaacctgatcggcgggaataaacgccacggactcttgcggtgcaagcgtaacctgcaacggcccgttgtccgtcgccagccagaaggagacttctgtcccttgcggggtgtcccgccagtgtcgggttaagataaaacctgcctgcgccacgctgaaaatccatcaaaaaaccaggcttgagtatagcctggtttcgtttgattggctgtggttttatacagtcattactgcccgtaatatgccttcgcgccatgcttacgcagatagtgtttatccagcagcgtttgctgcatatccggtaactgcggcgctaactgacggcagaatatccccatataagcgacctcttccagcacgatggcgttatgcaccgcatcttcggcatttttgccccatgcaaacgggccgtgggaatggaccagaacgccgggcatttgcgctgcatcgataccctgtttttcaaaggtttctacgatgacgttaccggtttcccactcatattcgccgttgatttctgcgtcggtcattttgcgggtgcagggaatggtgccgtagaaatagtcggcgtgggtggtgccggttgctggaatgctctgacccgcctgcgcccagatggtggcgtggcggctgtgcgtatgcacaatgccgccaatggaggggaatgcctgatagagcagccggtgagttggcgtgtcggaggagggctttttcgtaccttcaaccacttcaccggtttcgatgctaaccacgaccatatcgtcagcggtcatgacgctgtaatcgacgccggaaggtttgatcacaaagacgccgcgctcgcgatcaacggcgctgacgttgccccatgtgagcgtgaccaggttgtgttttggcagcgccaggttggcttctaatacctggcgtttgagatcttctaacatgttgactccttcgtgccggatgcgctttgcttatccggcctacaaaatcgcagcgtgtaggcctgataagacgcgccagcgtcgcatcaggcgttgaatgccggatgcgctttgcttatccggcctacaaaatcgcagcgcgtaggcctgataagacgcgccagcgtcgcatcaggcgttgaatgccggatgcgctttgcttatccggcctacaaaatcgcagcgtgtaggccagataagacgcgtcagcgtcgcatcaggcgttacataccggatgcggctacttagcgacgaaacccgtaatacacttcgttccagcgcagcgcgtctttaaacgctggcaggcgtgtgtcgttatcaatcaccgtgatttcaatgtcgtgcatctcggcgaattggcgcatatcgttgaggttcagtgcatggctgaagacggtatggtgcgcgccaccagcgaggatccacgcttcggaagcagttggcagatccggttgcgctttccacagcgcattcgccaccggcagtttcggcagggagtgcggtgttttcaccgtgtcgatgcagttaaccagtagacggtaacgatcgccgagatcaatcaagctggcgacaatcgctgggccggtttgggtattgaagatcaggcgggcaggatcgtccttaccaccaataccgagatgctgaacgtcgaggatcggtttctcttctgcggcgatgctcgggcagacttccagcatatgggagccgagcaccaggtcattacctttctcgaagtgataggtgtagtcctccataaaggaggtgccgccctgcagaccggtactcatcaccttcatgatgcgaagcagggcggcagttttccagtcgccttcgcccgcaaagccgtaaccctgctgcatcagacgctgtacggccagaccaggaagctgtttcagaccgtgcaaatcttcaaaggtggtggtgaacgcgtggaagccaccttgttccaggaaacgcttcatccccagctcaatacgcgccgcttccagcacgttctgtcgttttttgccgtggatttgtgtggcaggcgtcatggtgtagcagctttcgtactcatcgaccagcgcgttaacatcgccgtcgctgatggagttcaccacctgcaccagatcgccaaccgcccaggtattgacggagaaaccgaacttgatctgtgcggcaactttatcgccatcggtgaccgccacttcacgcatgttatcgccaaatcggcagactttcagatgacgggtatcctgtttagagaccgcctgacgcatccaggagccgatacgctcatgggcttgtttatcctgccagtgaccggtaaccacggcatgttgctgacgcatacgcgcgccaatgaagccgaactcgcgaccgccatgtgcagtctggttcaggttcataaagtccatatcgatactgtcccacggcagcgccgcgttgaactgggtgtggaattgcagcaacggtttgttgagcatggtcaggccgttgatccacattttggccggggagaaggtgtgcagccacaccaccagaccagcgcaacgatcgtcgtaattcgcgtcgcggcaaatagcggtgatttcatccggcgtggtgcccagcggtttcaacaccagtttgcagggcagtttcgcttccgtattcagcgcattaacgacgtgctcggcatgttgggtgacctgacgcagggtttccgggccatacagatgctggctgccaatgacaaaccacacttcataattatcaaaaatcgtcattatcgtgtccttatagagtcgcaacggcctgggcagcctgtgccggggcggaagttggaagatagtgttgttcggcgctcatcgcccattgctgatagcggcgataaagctgttcaaagcgttgtgcctgctcgctgcacggttgcagggttttctctaccgcactggccattttttgctgagcacttgggatgtctgcgtgcactttcgcggcgacggcagcaaaaatcgccgcaccgagcgcacagcactggtcagaggcaacaatttgcagcgggcgattcagcacgtcgcagcaggcctgcataatgacctggtttttccgcgcgatgccgcccagtgccatcacgttattaacggcgatcccctgatcggtaaagcactccatgattgcgcgtgcgccaaaggcggtggcagcaatcaaaccgccgaacagcagcggagcgtcggtagcgaggttaagatcggtaatcacccctttcaggcgttggttagcgttcggtgtgcggcggccgttaaaccagtcgagcaccaccggcaggtgatccagagacggatttttggcccatgcttcggtcagcgccggaagcagttgtttctggctggcgttgatttgcgttttcagttccggatgctgggcggcaagctgttccagcggccagccgagtacgcgaccaaaccaggcgtagatatcaccaaacgcgctttggcctgcttccagaccgataaatccaggcaccacgctgccatcaacctgaccgcaaatacctttaactgcccgctcgccaacgctctgtttgtcggcaatcggaatgtcgcaggtggaagtaccgataacttttaccagtgcgttaggctgtgcgcctgcgccaactgcgcccatatggcagtcaaacgcgccgccggaaatcaccacgctttcaggcaggccgagacgctgcgcccattccgggcataaggtgcccaccggaatatcggcagtccaagtgtcagtgaacagcggggaaggcaaatggcgattgaggatcgggtccagctcatcaaagaaactggctggcggcaggccgccccagctttcgtgccacagagatttatgcccggcgctgcaacgtccgcgacgaatatcctgcgggcgggtggtaccggaaagcagagctggcacccagtcgcacagctcaatccagcttgcggcagattgcgccacggcgctgtcctggcgagtcacatgcaggatttttgcccagaaccattcgctggaataaataccaccaatgtagcgggagtagtcaacgttgcccggcgcgtggcacaaacgggtaatctcttccgcttcttcaaccgcagtgtggtctttccacaatacgaacatcgcgttcgggttttcggcaaactccgggcgcagcgccagcacgtttccgtcggcatcaatcggtgcgggcgtgctgccggtactgtcaacgccaatcccgaccacagctgcgcgctgttcgacgctaagctctgcaagcacggttttcagtgccgcttccatactctcaatgtagtcacgcggatgatgacggaactggttattcggggcatcacaaaattgccctttctgccaacggggataccactctacgctggtggcgatctcttcaccggtagcgcagtccaccgccaaagctcgcacagaatcactgccaaaatcgaggccaattgcaatcgccatcgtttcactccatccaaaaaaacgggtatggagaaacagtagagagttgcgataaaaagcgtcaggtaggatccgctaatcttatggataaaaatgctatggcatagcaaagtgtgacgccgtgcaaataatcaatgtggacttttctgccgtgattatagacacttttgttacgcgtttttgtcatggctttggtcccgctttgttacagaatgcttttaataagcggggttaccggttgggttagcgagaagagccagtaaaagacgcagtgacggcaatgtctgatgcaatatggacaattggtttcttctctgaatggtgggagtatgaaaagtatggctgaagcgcaaaatgatcccctgctgccgggatacagctttaacgcccatctggtggcgggtttaacgccgattgaggccaacggttatctcgatttttttatcgaccgaccgctgggaatgaaaggttatattctcaatctcaccattcgcggtcagggggtggtgaaaaatcagggacgagaatttgtctgccgaccgggtgatattttgctgttcccgccaggagagattcatcactacggtcgtcatccggaggctcgcgaatggtatcaccagtgggtttactttcgtccgcgcgcctactggcatgaatggcttaactggccgagtatatttgccaatacgggtttctttcgcccggatgaagcgcaccagccgcatttcagcgacctgtttgggcaaatcattaacgccgggcaaggggaagggcgctatagcgagctgctggcgataaatctgcttgagcaattgttactgcggcgcatggaagcgattaacgagagcctccatccaccgatggataatcgggtacgcgaggcttgtcagtacatcagcgatcacctggcagacagcaattttgatatcgccagcgtcgcacagcatgtttgcttgagcccgagccgtctgagtcatcttttccgccagcagttagggattagcgtcttaagctggcgcgaggaccaacgcattagtcaggcgaagctgcttttgagcactacccggatgcctatcgccaccgtcggtcgcaatgttggttttgacgatcaactctatttcagccgagtatttaaaaaatgcaccggggccagcccgagcgagtttcgtgccggttgtgaagaaaaagtgaatgatgtagccgtcaagttgagttaattggtaacgaatcagacaattgacggcttgacggagtagcatagggtttgcagaatccctgcttcgtccatttgacaggcacattatgcaagcattgctggaacactttattacccaatccaccgtgtatagtttgatggcggtggtgttggtggcctttctggagagcctggcgctggtcggtttgattctacccggtacggtgctgatggcggggctgggagcgctgattggcagcggcgagttaagtttctggcacgcctggctggcagggattattggctgcttgatgggcgactggatttctttctggctgggttggcgttttaaaaagccgttgcatcgctggagttttctgaagaaaaacaaagcactacttgataaaactgaacatgcgttgcatcaacacagcatgttcaccattctggtcggtcgttttgttggcccgacgcgtccgctggtgccaatggtggcgggaatgctggatctgccggtggctaaatttattacgccgaatattatcggctgcctgctgtggccgccgttttacttcctgccagggattctggcgggcgcggcgatcgatattcctgccggaatgcagagcggtgagtttaaatggttgctgctggcaacagcggtgtttttgtgggttggtggctggctgtgctggcggttatggcgcagcggtaaagcgactgaccgtttgagtcattatttgtcccgcggtcgtttgttgtggctgacgccgttgatttctgccatcggcgtggtggcgctggtggtgttaattcgccacccgttgatgccggtgtatatcgatattttgcgtaaagtggttggggtttaagagatagtcttgtgcgggttgcctgatgcgacgcttgccgcgtcttatcaggcctacaaaacgcactacccgtaggtcggataaggcgttcacgccgcatccgacagtgcatattaacccgtaatccccaatagtgcgctagcactcgccttaccgctcaacaactcattggtcataccctgccaggcgatgcgcccgtcggcgactactacgctgcgcgtggcgatccgcgccgcatcttccacgctgtggctcaccatcaatagcgtcattttttgctgctggcagctcgtgctcaccagcgtcaacatctcctgacgtaacgccggatcgagcgcagagaacggttcatcgagcaataaaatcggctgttcgcgtaccagacaacgcgctaacgccactcgctgtcgctgaccgccggaaagctcgcccggtaaccgcgccattaaattatcaatccccatctggcgggcgatagcgtgcattttcccctgctgtaccgcgttcagtttcaatcccggatttagccccagcccgatgttctgtgcgaccgtcaggtggctgaacaggttgttctcctgaaacagcatgctcaccggacggcgactcggcggcatagttgtgtgatctacgccatcgatagtcaggctaccgctggctggcgtcagaaaaccggcgatcaaattcagcagggtacttttacccgcgccgcttggcccgaggatcgccacctgctcgccgcgttccaccgttaagctaaaacgcatcggcaaatggtggtaaagccaggtgatatcagtcagttttaacatttcgccccggtagtttttcaatcacggtaaacagcagaaaacagagcagcagcagaattaacgcggtgaccgcaccgtcctggctgcgataggagccaatttgctggtagagataaaacggcagggtgcggaaatcatcgttaccgaacaacgccaccacgccaaaatcaccaatgctcagcacgcatgcaaaggccagcgcctgcgccagtggacgtttcagggcgcgcagctccaccacttttaagcgactccagccttcaatccccaggctctgacataacatgctgtagcgggcggtgatatcgcgcatcgggttttccagcactttcagcgcataagggatcgccattaacgcattggtgaaaatcacaatgccgtcagcagattgtggcaggccgatagtgttgttgagcagtaaaaagaagccggtagccagcacaatccccggcatggcgaggatcaacatgccgctcatctccagcacctgacccgccagcattttctgccgcgcccgcagttcgcgactgctccatagcagcatcatggtcagcactacgcacaatacacctgccgccagcgcaatacgcaagctggtccacagcgcctgccacagcaccggttgtgccagcacttccggcaactggcgatttaccccatcgacgatcaccgccagtaacggtggcagcaacagcagcagcgccagcacaattaacaccgtgtcgcaaatgcggctatgcagacgatcgtccgggtcgcgccagccttgcagcagcgtggtgccgggcgcaatggccttactcaatcgctgactcaacagcaccagcccgaggcagcacaccatctggagcagcgccagcattgccgcgcgggcaggatcgtagtcgtaactcagcgcctgatagattgccagctcgatagtggtcgcctgcggaccgccccccaggcttagcacggtggcgaagctggcgaaacagagcataaagataagcgcagcaaccggcgggatttgtcgccgtaaccacggccattcgacgaagcggaaaaaatgccagctacgcatcccaagctgggcggcaagttgacgctgttcgccggggatgttttccagtgcctggagtaataagcggctcgccatcggcagattaaaaaacacatgggccagcaaaataccttgcaggccgtaggggctaaaggtccactccagaccgaggctttggcagagtgttgccagccagccctggcgaccatagacgctaagaatgccgaaaacagcgaccaacaccgggaggatcaaggtcattgcacacagacgcaacagcgccagccgacccggaaagcgcctgcgatagagcgcgcgggcgaggaatatcgcgggtatgacagagagcagtgcgctgagaaacgcctgccagaaggagaagcgcaccacatgccacagatagctgtcctgccagactgccacccagtcatcctgcggcgcgttccaccacagggcgagaaacgccgccagcgcaaccgctaccaccagcgtggtggcgcttacacctggaattaaccagccgggaattaacggctgacggcgcgttgccattcgctaatccatgcctgacgttgtgccgccacttcggctggcgtgaactccaacgtggttgcgggtttggtcaatttttcaaaaccggcaggcagcgtgacgtttgccaccggatacatccagttgccggttgggatcgcattctggaaagccggagaaaccataaactggaggaatttttgcgccagctccggctgcttgctggcagcggtgcgggcggcgacttccacttgcagatagtgaccttcgctgaagttcgcggcggcgtagttatctttcttctcttcgagaatgtgataagccggagaggtggtgtaactcagtaccagatcgctttcaccttttaaaaacaggccgtaggcttcgctccagcctttggtgaccgtgaccgttttcttcgccagtttctgccaggcttgtggggcgtcatcgccatagactttttgcatccatagcaacagacccagccccggtgtactggtgcgcggatcctgataaatcacccgccagttttgatcgctctcaaccagttctttcaggctttgtggcgggtttttcagtttgttcttgtcataaacgaaggcgaagtagccataatcaaacggtacgaaagtgtcattattccagccgccgggaacgttaacggcatccgctgccacaccgcttttggcaaacagtccggttttactggcggcgtctaacaggttgttatccagccccagcaccacatcggctttactgtttttgccttccatccgtagacggttgagaaggctaacgccatcttccagcgccaccagtttcagttcgcaattacagtcggcttcaaaggcttttttaaccaccggaccaggcccccagtcggcggcgaaggaatcgtaggtataaacagtcagaacgggtttagcgaaaacgggcgctgtgcacagcaacagcaggggcagacatttttttaacactttgcacctcaaaaaagagtggcaaaggacttgagaaggagcctcaaatcccttcgccggcgttatccggatcaggttcgacgggtattttctcagcgcacgcgtacgcgtggcaccccgttgagaacggcgttagtgtagtgattttgttatcaaccagcaatcatggatccggtggcgcaaaccacgcacttttaaaatcgaaccagccgagggtattcatgcgcaggccgcgcatactgcgttgcccctgaatgatcagccagtggtgcaataatggcaccatcgctttgctggcgaccagttgctggcaccagttcgccagattcatctcgccattgcgccagcgagcagcgtcggcttgccagtcaatgggaatgcaatgttgtagcagtggcacttcgcataaatgtgcgaaaacagagaagtccagcggcagggtaaagttggcgctgtttagccagatatcactttcgatctctcctgtatgccactgatcgtagtcgatctctttgattttcagcgtgacctggtgacttgccagaatctgctgcatgatcccggcaatcacccgatgctcactgtgatcctgataaaaggttagggtgaggctttccaggccagccggtttttcgctctttatggtgcgggcatggtgccaacgggggagcagtccataagccgggaaccacagttgctggtactgttcctcagcgaaatagaccagattagttggagaaagcacatagcttacccagtccctgacttgctgattcgccccgcgatgggtgcggctgtcgaacagtaaatagtagcaaccttcctccaggcggctttcaatctctttttcctcgccctgtggaccttttagcatcagccctccggctggctcgtcggcaatttccggcagaacccagacgttaacttcgtcgattaatgcccggtaaccgaagaagtcatcgaatgcctgaattttcagttgattggtgctgttgcgaatcaccgcatacggaccggtgccgatgggatggctggcaaagttactgagggtttcccattcgcgcggcaggatcatcgccggaacttgccccagcagtaacggtaaccagcggtccggttgcgtgagatggatatccagcgtccagggcgtcgggctcacaatgtcagcaatatggctatagagcggcagcgtattgattcgttttaaagaggcgatcacatcgtccatttccagttcacgaccatggtgaaaatggactcctggacgcaaaaagaaacgccagtgaagcggactaatttgctgccagtggtgggcgatgtctgcttccagttccccattttcctcatttatgcgcgttaggctactgaagatttgccgggcgatatgggtttcggaacggcgcaatgcgctgccaggtagcagattacgcaacggacgatagtagagcacgcgcaggatgtgccgcccctggcggaagctgcggcccagatgagaaaccagcatttgccgcacagtcgctttgtcgccaaccaactgcaccagttgatcgatacgatcctgctccagcaggtcttccgcccgctgttgctgaagcgccagcccggtatagaggaatgtcagacggctgcgtttaccgcgcccgacttccgcttcccacgtcagccagccgcgatcctgcatggtgttgagcagggtgcgcatatgacgacggctgcagctcaataacgctgccagttcgttgagcgttgtgtcctggcttttaccctcgcagcattgccacaggcggatgaactgttgttgcagacgagcagatggcataaaaggggaactcctgtgcaaaagacagcaattttattttccctatattaagtcaataattcctaacgatgaagcaagggggtgccccatgcgtcagttttatcagcactattttaccgcgacagcgaagttgtgctggttgcgttggttaagcgtcccacaacgattaaccatgcttgaaggactgatgcagtgggatgaccgcaattctgaaagttgacttgcctgcatcatgtgtgactgagtattggtgtaaaatcacccgccagcagattatacctgctggttttttttattctcgccgcgctaaaaagggaacgtatgatctggataatgacgatggctcgccgtatgaacggtgtttacgcggcatttatgctggtcgcttttatgatgggggtggccggggcgctacaggctcctacattgagcttatttctgagtcgtgaggttggcgcgcaacctttctggatcggcctcttttatacggtgaatgctattgctgggatcggcgtaagcctctggttggcaaaacgttctgacagtcagggcgatcggcgaaaactgattatattttgctgtttgatggctatcggcaatgcgctattgtttgcatttaatcgtcattatctgacgcttatcacctgtggtgtgcttctggcatctctggccaatacggcaatgccacagttatttgctctggcgcgggaatatgcggataacagcgcgcgagaagtggtgatgtttagcagcgtgatgcgtgcgcagctttctctggcatgggttatcggtccaccgttggcctttatgctggcgttgaattacggctttacggtgatgtttagcattgccgccgggatattcacactcagtctggtattgattgcatttatgcttccgtctgtggcgcgggtagaactgccgagcgaaaatgctttaagtatgcaaggtggctggcaggatagtaacgtacggatgttatttgtcgccagcacgttaatgcggacctgcaacaccatgtacattattgatatgccgttgtggatcagtagcgagttaggattgccagacaaactggcgggtttcctgatggggacggcagctggactggaaataccagcaatgattctggctggctactatgtcaaacgttatggtaagcggcgaatgatggtcatagcagtggcggcaggagtactgttttacaccggattgattttctttaatagccgtatggcgttgatgacgctgcaactttttaacgctgtatttatcggcattgttgcgggtattgggatgctatggtttcaggatttaatgcctggaagagcgggggcagctaccaccttatttactaacagtatttctaccggggtaattctggctggcgttattcagggagcaattgcacaaagttgggggcactttgctgtctactgggtaattgcggttatttctgttgtcgcattatttttaaccgcaaaggttaaagacgtttgatgacgtggacgatagcggaaagcccggtcatttgaccgggcaaggggattaattcataaacgcaggttgttttgcttcataagcggcaatggcgtcgtcgtgctgcaaggtaagcccaatactgtccagaccgttcatcatgcagtggcggcggaaggcatcgatggtaaagcgataggttttctctcccgctttcacctcttgcgcttccagatccacgtcgaaatggatccccggattagctttcaccagcgcaaacagttcgtccacttctgcatcgcttaatttcaccggcagcagctggttgttaaagctattgccgtagaagatgtcagcaaaactcggcgcaatcaccactttaaaaccgtagtcggtcaatgcccagggcgcgtgctcacggctagagccacagccgaagttttctcgtgccagcaaaatggaagcgccctgatactgcgggaagttcagcacgaagtccgggtttggctgttggcctttttcatccagaaaacgccagtcgttaaacagatgcgcgccaaaacccgtacgggtcactttctgcaaaaactgtttcgggatgattgcatcggtatcgacattggcggcatccagcggaaccaccaggcctgtgtgtttgataaatttctctgccatggtgtgctccttatttaatgttgcgaatgtcggcgaaatgtccggtcacagcagcagcggcagccattgccgggctgaccagatgcgtgcgcccgccgcgcccctggcggccttcaaagttacggttgctggtggaggcacaacgttcgcccggattcagacggtcgttgttcatcgccagacacatactgcagccaggcaagcgccattcaaaaccggcttcaataaagattttatccagaccttccgcttccgcctgggcttttaccgggccagagccgggaaccaccagtgcctgcacgcctggcgcgacttttcgccctttggcgatctccgctgccgcgcgtaaatcttcaatgcggctgttggtacaggaaccgataaacactttgtcgatagccacttcggtcagcggaatacccggtttcagccccatataggccagcgctttttctgcgctcgcgcgttcaaccggatcggcaaagctagccggatcgggaatattgtcgttcacggaaatcacctggccgggattggtgccccaggtgacctgcggactaatttcttctgcttgcagagtgacaacggtatcgaaagttgcgccttcgtcggtttgcagggttttccagtaggcaacggcgtcgtcgaaatctttgcctttcggcgcatgcagacggcctttgacatagttaaaggtggtttcgtccggtgcaaccagaccggcttttgcgcccatttcgattgccatattgcacagggtcatacgaccttccatgcttaaatcacggattgcttcgccgcaaaactccaccacatgcccggtgccgcctgcgctaccggttttaccgataattgccagcacgatatcttttgcggtaatgcccggcgcggctttgccctggacttcaattttcatggtttttgcgcggccctgtttcagggtttgcgttgccagtacgtgttcaacttcggaagtgccgataccaaaggccagtgcgccaaacgcgccgtgggtggcggtatggctgtcgccgcagacaatggtcatccccggcaaggtgacgccctgttccggccccattacgtggacgatcccctgatacgggtgattcaggtcatacagttcgacgccaaattctttgcagtttttgatcagttcctgcatctggatacgcgccatttcaccgcaggcattaatgtctttggtctgggtagagacgttgtgatccatggtagcgaaggttttgcccggctgacgtaccgggcgaccgtgggcgcgcagaccatcgaacgcctgcggactggtcacttcatgcaccaggtggcggtcgatatataacagtggggtttcgttttcggcttcgtacacaacgtgagcgtcgaacaatttttcgtataacgtcttagccatgattacaccccttctgctacatagcgggcaatgatatcgcccatttcatcggtactaacggcggcagcgccacgggctaaatccccggtgcgaatgccttcttctaatgcgcggttaatggcgcgttcaatggcgcaagccgcatcatcggcatccaggctgtaacgcagcagcagtgccaggctaaggatttgtgcaatcgggttggcgatgtttttgcctgcgatatctggtgcgctgccgcccgccggttcatacagtccaaaaccttgctcgttcaggctggcggaaggcaacatccccatgctgccagtgatcattgcgcactcgtcagacagaatgtcgccaaacaggttggagcacagcagaacgtcaaactgacttggatctttaatcagctgcatggtggcgttgtcgatgtacatatgcgccagttcgacatccgggtattccgtggcgatctcgttaacgatctcccgccataaaatagaggattgcagcacgttggctttatcgatgctcgtcactttgtggcgacgcttgcgagcagattcaaacgcgatgcgggcgatacgttcgatctcaaaacggtgatacacctcggtatcaaaggctttttcatattgtccgctaccttcgcggccttttggctgaccgaaatagatgccgccggtcagttcgcgcacacacaggatgtcgaagccgtttgcggcaatgtctgcacgcagcggacagaatgcttccagcccctgatacagttttgccgggcgcaggttgctgaataatttgaagtgcttacgcagaggcagcagcgcgccgcgttctggttgctggtctggtggtaaatgttcccacttcgggccgcctacgctgccaaacagcacggcatcggcttgctcacaaccttcaaccgtcgcaggcggcagtggttgcccgtggttatcaatggctgcgccgcctacatcgtaatggctggtggtgatgcgcatcgcaaagcggttgcgcacggcatccagcactttcagcgcctgggtcatcacttccggaccaataccgtcccccggcaatacggcaatatggtaattcttgctcatcacacggtttccttgttgttttcgttgtgttgagctttgcgttgcaactctttttcgacttctgcggcacgccagatattgttcagaacgtgcaccatggctttggcagaactctcgacaatatcggtagccaggccgacgccgtggaagcggcgaccgttgtagttagcgacgatatccacctgacccagcgcatctttaccgtggcctttggcggtcaggctgtatttcaccagttcgacgttatattcagtgatgcggttaattgcctgatagacggcatcgaccggaccgttaccgttggcggcttctgctttgacttcttcgccacaggccagtttgacggcggcggtggcgatatcgttagagccagactgcacgctgaagtaatccagacggaaatgctccggctcttcttgctgcttaccgatgaaggccagcgcctccagatcgtaatcaaacacctgaccttttttgtccgccagcttcaggaaagcatcgtacaaattgtctaaattatattcactttctttataccccatctcatccatgcgatgtttcaccgccgcacgcccgctacgagaggtcagattcagctggatttggttcagaccaatagattctggtgtcatgatttcgtagttttcgcggtttttcagcacgccatcctggtgtataccggaggagtgtgcgaatgcgccgctgccaacaatggctttgtttgccgggatcggcatattacaaatctggctaactaactggctggtgcgccatatctcctggtgattaatggcggtgtggacgttgagaatatccttacgaactttgatcgccatgatgacttcttccagggaacagtttccggcacgctcgccgatcccgttcattgcgccttccacctggcgtgcaccggcatgtaccgccgccagactgtttccgaccgccaggcccaaatcgtcgtgggtatgtacggagataatggctttgtcgatgttaggcacgcgttcatacaggccgctgatgattccggcgaactcaaacggcatggtgtagcccacggtgtccggaatgttgatggtggtggcaccggcattaatcgccgcttcgaccactcgcgccagatcggcaatgggtgtacgcccggcatcttcgcaagaaaattcaacatcatcggtgtaattacgggcgcgtttcaccatatagatagcgcgttcgatcacctcgtccagcgtgctgcgcagcttggtggcgatgtgcattgggctagtggcaataaaggtatgaatacggaaggcttcggcgactttcagggattcggccgccacgtcgatatctttttccacgcagcgagctaacgcacatacgcggctgtttttaacctggcgggcgatggtttgcacgctttcaaaatcgcccgggctagagacggggaaaccgacttccatcacgtcaacacccatacgctcaagggccagcgcaatttgcagtttttctttcacactcaagcttgcctgtaacgcctgttcaccgtcgcgcaatgtggtatcgaaaataatgacttgctggctcatggtttgggtccttgtctcttttagagcgcctcgcttcgggcataaaaaaacccgcgcaatggcgcgggttttttgtttgactgcgtgctggcttaatgctggatgccgctcactcgtctaccgcgcaaagaagatgcgtttagtagtagtagaccgataaagcgaacgatgtgagtcattaaatcagctccagatgaatgcgatatgcttttagagttactggatacaaaaacggatgtcaaccctgacgcaataaaaacgtcccgccagcgtgagttctgcatccgtaaaattagctaattgtgctgcggtggttaaagtaagcgatattaatttctgcttaactaccgacgcttttcatcggttgacatatttcagcataaatttttgcatctaatcaacgaggaaaaaggggacaaaatgcacgcgttgcaaaacctatcctgatgatttgtattgaattatatgttttgcgattttttttgatattgatttggtgaatattattgatcaattaatgttaagaattaatgcattaaatatataaattaattattaaataagcacatttaatccattttgtagatgattgagtattcgcggtagttatgattagattgttttcgcaacaaaaacattatggattattatgctgtggtaaatgactcattccacggcaatggattctgtttttatcagaacccgtatctttatgttttccgaattttactcattttgctttttcttattttatatgcatgataaatcatattcttcaggattatttctctgcattccaataagggaaagggagttaagtgtgacagtggagttaagtatgccagaggtacaaacagatcatccagagacggcggagttaagcaaaccacagctacgcatggtcgatctcaacttattaaccgttttcgatgccgtgatgcaggagcaaaacattactcgtgccgctcatgttctgggaatgagccaacctgcggtcagtaacgctgttgcacgcctgaaggtgatgtttaatgacgagctttttgttcgttatggccgtggtattcaaccgactgctcgcgcatttcaactttttggtagtgttcgtcaggcattgcaactagtacaaaatgaattgcctggtagtggttttgaacccgcgagcagtgaacgtgtatttcatctttgtgtttgcagcccgttagacagcattctgaccagccagatttataatcacattgagcagattgcgccaaatatacatgttatgttcaagtctagtttaaatcagaacactgaacatcagctgcgttatcaggaaacggagtttgtgattagttatgaagacttccatcgtcctgaatttaccagcgtaccattatttaaagatgaaatggtgctggtagccagcaaaaatcatccaacaattaagggcccgttactgaaacatgatgtttataacgaacaacatgcggcggttagcctcgatcgtttcgcgagttttagtcaaccttggtatgacacggtagataagcaagccagtatcgcgtatcagggcatggcaatgatgagcgtacttagcgtggtgagccaaacgcatttggtcgctattgcgccgcgttggctggctgaagagttcgctgaatccttagaattacaggtattaccgctgccgttaaaacaaaacagcagaacctgttatctctcctggcatgaagctgccgggcgcgataaaggccatcagtggatggaagagcaattagtcagtatttgcaaacgctaactgattgcagaataggtcagacatgaatgtctggtttattctgcattttttattgaatgtagaattttattctgaatgtgtgggctctctattttaggattaattaaaaaaatagagaaattgctgtaagttgtgggattcagccgatttattatcaatttaatcctctgtaatggaggattttatcgtttcttttcacctttcctcctgtttattcttattaccccgtgtttatgtctctggctgccaattgcttaagcaagatcggacggttaatgtgttttacacattttttccgtcaaacagtgaggcaggccatggagatgttgtctggagccgagatggtcgtccgaagccttatcgatcagggcgttaaacaagtattcggttatcccggaggcgcagtccttgatatttatgatgcattgcataccgtgggtggtattgatcatgtattagttcgtcatgagcaggcggcggtgcatatggccgatggcctggcgcgcgcgaccggggaagtcggcgtcgtgctggtaacgagcggtccaggggcgaccaatgcgattactggcatcgccaccgcttatatggattccattccattagttgtcctttccgggcaggtagcgaccagcttgataggttacgatgcctttcaggagtgcgacatggtggggattagccgaccggtggttaaacacagttttctggttaagcaaacggaagacattccgcaggtgctgaaaaaggctttctggctggcggcaagtggtcgcccaggaccagtagtcgttgatttaccgaaagatattcttaatccggcgaacaaattaccctatgtctggccggagagcgtcagtatgcgttcttacaatcccactactaccggacataaagggcaaattaagcgtgctctgcaaacgctggtagcggcaaaaaaaccggttgtctacgtaggcggtggggcaatcacggcgggctgccatcagcagttgaaagaaacggtggaggcgttgaatctgcccgttgtttgcagtttgatggggctgggggcgtttccggcaacgcatcgtcaggcactgggcatgctgggaatgcacggtacctacgaagccaatatgacgatgcataacgcggatgtgattttcgccgtcggggtacgatttgatgaccgaacgacgaacaatctggcaaagtactgcccaaatgccactgttctgcatatcgatattgatcctacttccatttctaaaaccgtgactgcggatatcccgattgtgggggatgctcgccaggtcctcgaacaaatgcttgaactcttgagccaagaatccgcccatcaaccactggatgagatccgcgactggtggcagcaaattgaacagtggcgcgctcgtcagtgcctgaaatatgacactcacagtgaaaagattaaaccgcaggcggtgatcgagactctttggcggttgacgaagggagacgcttacgtgacgtccgatgtcgggcagcaccagatgtttgctgcactttattatccattcgacaaaccgcgtcgctggatcaattccggtggcctcggcacgatgggttttggtttacctgcggcactgggcgtcaaaatggcgttgccagaagaaaccgtggtttgcgtcactggcgacggcagtattcagatgaacatccaggaactgtctaccgcgttgcaatacgagttgcccgtactggtggtgaatctcaataaccgctatctggggatggtgaagcagtggcaggacatgatctattccggccgtcatagtcaatcttatatgcaaagcctacccgatttcgtccgtctggcggaagcctatgggcatgtcgggatccagatttctcatccgcatgagctggaaagcaaacttagcgaggcgctggaacaggtgcgcaataatcgcctggtgtttgttgatgttaccgtcgatggcagcgagcacgtctacccgatgcagattcgcgggggcggaatggatgaaatgtggttaagcaaaacggagagaacctgattatgcgccggatattaagtgtcttactcgaaaatgaaagtggcgcgttatcccgcgtgattggccttttttcccagcgtggctacaacattgaaagcctgaccgttgcgccaaccgacgatccgacattaagccgtatgaccatccagaccgtgggcgatgaaaaagtacttgagcagatcgaaaagcaattacacaaactggtcgatgtcttgcgcgtgagtgagttggggcagggcgcgcatgttgagcgggaaatcatgctggtgaaaattcaggccagcggttacgggcgtgacgaagtgaaacgtaatacggaaatattccgtgggcaaattatcgatgtcacacccagcctttataccgttcaattagcaggcaccagcggtaagcttgatgcatttttagcaagcattcgcgatgtggcgaaaattgtggaggttgctcgctctggtgtggtcggacttagccgcggcgataaaataatgcgttgagaatgatctcaatgcgcaatttacagcccaacatgtcacgttgggctttttttgcgaaatcagtgggaacctggaataaaagcagttgccgcagttaattttctgcgcttagatgttaatgaatttaacccataccagtacaatggctatggtttttacattttacgcaaggggcaattgtgaaactggatgaaatcgctcggctggcgggagtgagccggaccactgcaagctatgttattaacggcaaagcgaagcaataccgtgtgagcgacaaaaccgttgaaaaagtcatggctgtggtgcgtgagcacaattaccacccgaacgccgtggcagctgggcttcgtgctggacgcacacgttctattggtcttgtgatccccgatctggagaacaccagctatacccgcatcgctaactatcttgaacgccaggcgcggcaacggggttatcaactgctgattgcctgcagtgaagatcagccagacaacgaaatgcggtgcattgagcaccttttacagcgtcaggttgatgccattattgttagcacgagcttgcctcctgagcatcctttttatcaacgctgggctaacgacccgttcccgattgtcgcgctggaccgcgccctcgatcgtgaacacttcaccagcgtggttggtgccgatcaggatgatgccgaaatgctggcggaagagttacgtaagtttcccgccgagacggtgctttatcttggtgcgctaccggagctttctgtcagcttcctgcgtgaacaaggtttccgtactgcctggaaagatgatccgcgcgaagtgcatttcctgtatgccaacagctatgagcgggaggcggctgcccagttattcgaaaaatggctggaaacgcatccgatgccgcaggcgctgttcacaacgagctttgcgttgttgcaaggagtgatggatgtcacgctgcgtcgcgacggcaaactgccttctgacctggcaattgccacctttggcgataacgaactgctcgacttcttacagtgtccggtgctggcagtggctcaacgtcaccgcgatgtcgcagagcgtgtgctggagattgtcctggcaagcctggacgaaccgcgtaagccaaaacctggtttaacgcgcattaaacgtaatctctatcgccgcggcgtgctcagccgtagctaagccgcgaacaaaaatacgcgccaggtgaatttccctctggcgcgtagagtacgggactggacatcaatatgcttaaagtaaataagactattcctgactattattgataaatgcttttaaacccgcccgttaattaactcaccagctgaaattcacaataattaagtgatatcgacagcgcgtttttgcattattttgttacatgcggcgatgaattgccgatttaacaaacacttttctttgcttttgcgcaaacccgctggcatcaagcgccacacagacgtaacaaggactgttaaccggggaagatatgtcctaaaatgccgctcgcgtcgcaaactgacactttatatttgctgtggaaaatagtgagtcattttaaaacggtgatgacgatgagggattttttcttacagctattcataacgttaatttgcttcgcacgttggacgtaaaataaacaacgctgatattagccgtaaacatcgggttttttacctcggtatgccttgtgactggcttgacaagcttttcctcagctccgtaaactcctttcagtgggaaattgtggggcaaagtgggaataaggggtgaggctggcatgttccggggagcaacgttagtcaatctcgacagcaaagggcgcttaagtgtgcctacccgttatcgggaacagctgcttgagaacgctgccggtcaaatggtttgcaccattgacatttatcacccgtgcctgctgctttaccccctgcctgaatgggaaattatcgagcaaaaattaagccgtctgagcagcatgaacccggttgagcgccgtgtgcagcgcctactgttaggtcatgccagcgaatgtcagatggatggcgcaggtcgattgttaatcgcgccagtactgcggcaacatgccgggctgacaaaagaagtgatgctggttggacagttcaacaagtttgagctgtgggatgaaacaacctggcatcaacaggtcaaggaagatatcgacgcagagcagttggctaccggagacttaagcgagcgactgcaggacttgtctctataaaatgatggaaaactataaacatactacggtgctgctggatgaagccgttaatggcctcaatatccgtcctgatggcatctacattgatgggacttttggtcgcggtggtcacagtcgtctgatcctcagccagcttggcgaagaggggcgtttgctggcgatcgatcgcgacccgcaggctatcgccgttgcgaagactattgatgatccgcgcttctccatcatccacggacctttctccgcgctgggcgaatacgttgccgagcgcgatcttatcggcaagatcgacggcattctcctcgatcttggcgtctctagtccgcaacttgatgatgctgaacgtggcttttcctttatgcgcgatggtccgctggacatgcgtatggacccaacccgtgggcagagtgccgctgaatggctacaaaccgcagaagaagccgatatcgcctgggtattgaaaacctatggtgaagagcgttttgccaaacgcattgcccgcgccattgtcgagcgtaaccgcgaacagccgatgacccgcaccaaagaactggcggaagtcgtggctgctgcaacgccggtgaaagataagtttaaacatcccgcgacccgtaccttccaggcggtgcgcatttgggtaaacagtgaactggaggagatagagcaggcgctaaaaagcagcctcaacgtgctggccccgggtgggcggcttagcatcatcagcttccacagcctggaagaccgtattgtgaaacgttttatgcgtgaaaacagccgcggtccgcaagttccggcagggttaccgatgactgaagagcagctcaaaaaactgggtggccgtcagctgcgagcactaggcaagttaatgccgggcgaagaagaggtggctgagaaccctcgtgcccgtagtagtgttctgcgtattgcagagaggacgaatgcatgatcagcagagtgacagaagctctaagcaaagttaaaggaagcatgggaagccacgagcgccatgcattgcctggtgttatcggtgacgatcttttgcgatttgggaagctgccactctgcctgttcatttgcattattttgacggcggtgactgtggtaaccacggcgcaccatacccgtttactgaccgctcagcgcgaacaactggtgctggagcgagatgctttagacattgaatggcgcaacctgatccttgaagagaatgcgctcggcgaccatagccgggtggaaaggatcgccacggaaaagctgcaaatgcagcatgttgatccgagtcaagaaaatatcgtagtgcaaaaataaggataaacgcgacgcatgaaagcagcggcgaaaacgcagaaaccaaaacgtcaggaagaacatgccaactttatcagttggcgttttgcgttgttatgcggctgtattctcctggcgctggcttttctgctcggacgcgtagcgtggttacaagttatctccccggatatgctggtgaaagagggcgacatgcgttctcttcgcgttcagcaagtttccacctcccgcggcatgattactgaccgttctggtcgcccgttagcggtgagcgtgccggtaaaagcgatttgggctgacccgaaagaagtgcatgacgctggcggtatcagcgtcggtgaccgctggaaggcgctggctaacgcgctcaatattccgctggatcagcttagtgcccgcattaacgccaacccgaaagggcgctttatttatctggcgcgtcaggtgaaccctgacatggcggactacatcaaaaaactgaaactgccggggattcatctgcgtgaagagtctcgccgttactatccgtccggcgaagtgactgctcacctcatcggctttactaacgtcgatagtcaagggattgagggcgttgagaagagtttcgataaatggcttaccgggcagccgggtgagcgcattgtgcgtaaagaccgctatggtcgcgtaattgaagatatttcttctactgacagccaggcagcgcacaacctggcgctgagtattgatgaacgcctgcaggcgctggtttatcgcgaactgaacaacgcggtggcctttaacaaggctgaatctggtagcgccgtgctggtggatgtcaacaccggtgaagtgctggcgatggctaacagcccgagttacaaccctaacaatctgagcggcacgccgaaagaggcgatgcgtaaccgtaccatcaccgacgtgtttgaaccgggcagtacggttaaaccgatggtggtaatgaccgcgttgcaacgtggcgtggtgcgggaaaacagcgtactcaataccattccttatcgaattaacggccacgaaatcaaagacgtggcacgctacagcgaattaaccctgaccggggtattacagaagagcagtaacgtcggtgtttccaagctggcgttagcgatgccgtccagtgcgttagtagatacttacagtcgttttggactgggaaaagcgaccaatttggggttggtcggagaacgcagtggcttatatcctcaaaaacaacggtggtctgacatagagagggccaccttctctttcggctacgggctaatggtaacaccattacagttagcgcgagtctacgcaactatcggcagctacggcatttatcgcccactgagcattaccaaagttgaccccccggttcccggtgaacgtgtcttcccggaatccattgtccgcactgtggtgcatatgatggaaagcgtggcgctaccaggcggcggcggcgtgaaggcggcgattaaaggctatcgtatcgccattaaaaccggtaccgcgaaaaaggtcgggccggacggtcgctacatcaataaatatattgcttataccgcaggcgttgcgcctgcgagtcagccgcgcttcgcgctggttgttgttatcaacgatccgcaggcgggtaaatactacggcggcgccgtttccgcgccggtctttggtgccatcatgggcggcgtattgcgtaccatgaacatcgagccggatgcgctgacaacgggcgataaaaatgaatttgtgattaatcaaggcgaggggacaggtggcagaagctaaagcctgagcgcttcgcgctggttgttgttatcaacgatccgcaggcgggtaaatactacggcggcgccgtttccgcgccggtctttggtgccatcatgggcggcgtattgcgtaccatgaacatcgagccggatgcgctgacaacgggcgataaaaatgaatttgtgattaatcaaggcgaggggacaggtggcagatcgtaatttgcgcgaccttcttgctccgtgggtgccagacgcacctagccgagcactgcgagagatgacactcgacagccgtgtggctgcggcgggcgatctctttgtagctgtagtaggtcatcaggcggacgggcgtcgatatatcccgcaggcgatagcgcaaggtgtggctgccattattgcagaggcgaaagatgaggcgaccgatggtgaaatccgtgaaatgcacggcgtaccggtcatctatctcagccagctcaacgagcgtttatctgcactggcgggccgcttttaccatgaaccctctgacaatttacgtctcgtgggcgtaacgggcaccaacggcaaaaccacgactacccagctgttggcgcagtggagccaactgcttggcgaaatcagcgcggtaatgggcaccgttggtaacggcctgctggggaaagtgatcccgacagaaaatacaaccggtagcgcagtcgatgttcagcatgagctggcggggctggtggatcagggcgcgacgttttgcgcaatggaagtttcctcccacgggctggtacagcaccgtgtggcggcattgaaatttgcggcgagcgtctttaccaacttaagccgcgatcaccttgattatcatggtgatatggaacactacgaagccgcgaaatggctgctttattctgagcatcattgcggtcaggcgattattaacgccgacgatgaagtgggccgccgctggctggcaaaactgccggacgcggttgcggtaagtatggaagatcatattaatccgaactgtcacggacgctggttgaaagcgaccgaagtgaactatcacgacagcggtgcgacgattcgctttagcagtagttggggcgatggcgaaattgaaagccatctgatgggcgcttttaacgtcagcaacctgctgctcgcgctggcgacactgttggcactcggctatccactggctgatctgctgaaaaccgccgcgcgtctgcaaccggtttgcggacgtatggaagtgttcactgcgccaggcaaaccgacggtggtggtggattacgcgcatacgccggatgcactggaaaaagccttacaggcggcgcgtctgcactgtgcgggcaagctgtggtgtgtctttggctgtggtggcgatcgcgataaaggtaagcgtccactgatgggcgcaattgccgaagagtttgctgacgtggcggtggtgacggacgataacccgcgtaccgaagaaccgcgtgccatcatcaacgatattctggcgggaatgttagatgccggacatgccaaagtgatggaaggccgtgctgaagcggtgacttgcgccgttatgcaggctaaagagaatgatgtggtactggtcgcgggcaaaggccatgaagattaccagattgttggcaatcagcgtctggactactccgatcgcgtcacggtggcgcgtctgctgggggtgattgcatgattagcgtaacccttagccaacttaccgacattctcaacggtgaactgcaaggtgcagatatcacccttgatgctgtaaccactgatacccgaaaactgacgccgggctgcctgtttgttgccctgaaaggcgaacgttttgatgcccacgattttgccgaccaggcgaaagctggcggcgcaggcgcactactggttagccgtccgctggacatcgacctgccgcagttaatcgtcaaggatacgcgtctggcgtttggtgaactggctgcatgggttcgccagcaagttccggcgcgcgtggttgctctgacggggtcctccggcaaaacctccgttaaagagatgacggcggcgattttaagccagtgcggcaacacgctttatacggcaggcaatctcaacaacgacatcggtgtaccgatgacgctgttgcgcttaacgccggaatacgattacgcagttattgaacttggcgcgaaccatcagggcgaaatagcctggactgtgagtctgactcgcccggaagctgcgctggtcaacaacctggcagcggcgcatctggaaggttttggcagccttgcgggtgtcgcgaaagcgaaaggtgaaatctttagcggcctgccggaaaacggtatcgccattatgaacgccgacaacaacgactggctgaactggcagagcgtaattggcagtcgcaaagtgtggcgtttcagtcccaatgccgccaacagcgatttcaccgccaccaatatccatgtgaccagccacggtacggaatttaccctacaaaccccaaccggtagcgtcgatgttctgctgccgttgccggggcgtcacaatattgcgaatgcgctggcagccgctgcgctctccatgtccgtgggcgcaacgcttgatgctatcaaagcggggctggcaaatctgaaagctgttccaggccgtctgttccccatccaactggcagaaaaccagttgctgctcgacgactcctacaacgccaatgtcggtagtatgactgcagcagtccaggtactggctgaaatgccgggctaccgcgtgctggtggtgggcgatatggcggaactgggcgctgaaagcgaagcctgccatgtacaggtgggcgaggcggcaaaagctgctggtattgaccgcgtgttaagcgtgggtaaacaaagccatgctatcagcaccgccagcggcgttggcgaacattttgctgataaaactgcgttaattacgcgtcttaaattactgattgctgagcaacaggtaattacgattttagttaagggtagtcgtagtgccgccatggaagaggtagtacgcgctttacaggagaatgggacatgttaatataagctttacaggagaatgggacatgttagtttggctggccgaacatttggtcaaatattattccggctttaacgtcttttcctatctgacgtttcgcgccatcgtcagcctgctgaccgcgctgttcatcagtttgtggatgggcccgcgtatgattgctcatttgcaaaaactttcctttggtcaggtggtgcgtaacgacggtcctgaaagtcacttcagcaagcgcggtacgccgaccatgggcgggattatgatcctgacggcgattgtgatctccgtactgctgtgggcttacccgtccaatccgtacgtctggtgcgtgttggtggtgctggtaggttacggtgttattggctttgttgatgattatcgcaaagtggtgcgtaaagacaccaaagggttgatcgctcgttggaagtatttctggatgagcgtcattgcgctgggtgtcgccttcgccctgtaccttgccggcaaagacacgcccgcaacgcagctggtggtcccattctttaaagatgtgatgccgcagctggggctgttctacattctgctggcttacttcgtcattgtgggtactggcaacgcggtaaacctgaccgatggtctcgacggcctggcaattatgccgaccgtatttgtcgccggtggttttgcgctggtggcgtgggcgaccggcaatatgaactttgccagctacttgcatataccgtatctgcgacacgccggggaactggttattgtctgtaccgcgatagtcggggcaggactgggcttcctgtggtttaacacctatccggcgcaggtctttatgggcgatgtaggtagcctggcgttaggtggtgcgttaggcattatcgccgtactgctacgtcaggaattcctgctggtgattatggggggcgtgttcgtggtagaaacgctttctgtcatcctgcaggtcggctcctttaaactgcgcggacaacgtattttccgcatggcaccgattcatcaccactatgaactgaaaggctggccggaaccgcgcgtcattgtgcgtttctggattattagcctgatgctggttctgattggtctggcaacgctgaaggtacgttaatcatggctgattatcagggtaaaaatgtcgtcattatcggcctgggcctcaccgggctttcctgcgtggactttttcctcgctcgcggtgtgacgccgcgcgttatggatacgcgtatgacaccgcctggcctggataaattacccgaagccgtagaacgccacacgggcagtctgaatgatgaatggctgatggcggcagatctgattgtcgccagtcccggtattgcactggcgcatccatccttaagcgctgccgctgatgccggaatcgaaatcgttggcgatatcgagctgttctgtcgcgaagcacaagcaccgattgtggcgattaccggttctaacggcaaaagcacggtcaccacgctagtgggtgaaatggcgaaagcggcgggggttaacgttggtgtgggtggcaatattggcctgcctgcgttgatgctactggatgatgagtgtgaactgtacgtgctggaactgagcagcttccagctggaaaccacctccagcttacaggcggtagcagcgaccattctgaacgtgactgaagatcatatggatcgctatccgtttggtttacaacagtatcgtgcagcaaaactgcgcatttacgaaaacgcgaaagtttgcgtggttaatgctgatgatgccttaacaatgccgattcgcggtgcggatgaacgctgcgtcagctttggcgtcaacatgggtgactatcacctgaatcatcagcagggcgaaacctggctgcgggttaaaggcgagaaagtgctgaatgtgaaagagatgaaactttccgggcagcataactacaccaatgcgctggcggcgctggcgctggcagatgctgcagggttaccgcgtgccagcagcctgaaagcgttaaccacattcactggtctgccgcatcgctttgaagttgtgctggagcataacggcgtacgttggattaacgatagcaaagcgaccaacgtcggcagtacggaagcggcgctgaatggcctgcacgtagacggcacactgcatttgttgctgggtggcgatggtaaaagcgcggactttagcccactggcgcgttacctgaatggcgataacgtacgtctgtattgtttcggtcgtgacggcgcgcagctggcggcgctacgtccggaagtggcagaacaaaccgaaactatggaacaggcgatgcgcttgctggctccgcgtgttcagccgggcgatatggttctgctctccccagcctgtgccagccttgatcagttcaagaactttgaacaacgaggcaatgagtttgcccgtctggcgaaggagttaggttgatgcgtttatctctccctcgcctgaaaatgccgcgcctgccaggattcagtatcctggtctggatctccacggcgctaaagggctgggtgatgggcagccgggaaaaagataccgacagcctgatcatgtacgatcgcaccttactgtggctgaccttcggcctcgcggcgattggctttatcatggtgaccagcgcgagtatgcccatagggcaacgcttaaccaacgatccgttcttcttcgcgaagcgtgatggtgtctatctgattttggcgtttattctggcgatcattacgctgcgtctgccgatggagttctggcaacgctacagtgccacgatgctgctcggatctatcatcctgctgatgatcgtcctggtagtgggtagcagcgttaaaggggcaagccgttggatcgatctcggtttgctgcgtatccagcctgcggagctgacaaaactgagcctgttttgctatatcgccaactatctggtgcgtaaaggcgacgaagtacgtaataacctgcgcggcttcctgaaaccgatgggcgtgattctggtgttggcagtgttactgctggcacagccagaccttggtacggtggtggtgttgtttgtgactacgctggcgatgttgttcctggcgggagcgaaattgtggcagttcattgccattatcggtatgggcattagtgcggttgtgttgctgatactcgccgaaccgtaccgtatccgccgtgttaccgcattctggaacccgtgggaagatccctttggcagcggctatcagttaacgcaaagcctgatggcgtttggtcgcggcgaactttgggggcaaggtttaggtaacagcgtacaaaaactggagtatctgccggaagcgcacactgactttattttcgccattatcggcgaagaactggggtatgtcggtgtggtgctggcacttttaatggtattcttcgtcgcttttcgcgcgatgagcattggccgtaaagcattagaaattgaccaccgtttttccggttttctcgcctgttctattggcatctggtttagcttccaggcgctggttaacgtaggcgcggcggcggggatgttaccgaccaaaggtctgacattgccgctgatcagttacggtggtagcagcttactgattatgagcacagccatcatgatgctgttgcgtattgattatgaaacgcgtctggagaaagcgcaggcgtttgtacgaggtagtcgatgagtggtcaaggaaagcgattaatggtgatggcaggcggaaccggtggacatgtattcccgggactggcggttgcgcaccatctaatggctcagggttggcaagttcgctggctggggactgccgaccgtatggaagcggacttagtgccaaaacatggcatcgaaattgatttcattcgtatctctggtctgcgtggaaaaggtataaaagcactgatagctgccccgctgcgtatcttcaacgcctggcgtcaggcgcgggcgattatgaaagcgtacaaacctgacgtggtgctcggtatgggaggctacgtgagtggtccaggtggtctggccgcgtggagcttaggcattccggttgtacttcatgaacaaaacggtattgcgggcttaaccaataaatggctggcgaagattgccaccaaagtgatgcaggcgtttccaggtgctttccctaatgcggaagtagtgggtaacccggtgcgtaccgatgtgttggcgctgccgttgccgcagcaacgtttggctggacgtgaaggtccggttcgtgtgctggtagtgggtggttctcagggcgcacgcattcttaaccagacaatgccgcaggttgctgcgaaactgggtgatagtgtcactatctggcatcagagcggcaaaggtagccaacaatccgttgaacaggcgtatgccgaagcggggcaaccgcagcataaagtgacggaatttattgatgatatggcggcggcgtatgcgtgggcggatgtcgtcgtttgccgctccggtgcgttaacggtgagtgaaatcgccgcggcaggactaccggcgttgtttgtgccgtttcaacataaagaccgccagcaatactggaatgcgctaccgctggaaaaagcgggcgcagccaaaattatcgagcagccacagcttagcgtggatgctgtcgccaacaccctggccgggtggagccgagaaaccttattaaccatggcagaacgcgcccgcgctgcatccattccggatgccaccgagcgagtggcaaatgaagtgagccgggttgcccgggcgtaattgtagcgatgccttttgcatcgtatgaatttaagaagttaatggcgtaaagaatgaatacacaacaattggcaaaactgcgttccatcgtgcccgaaatgcgtcgcgttcggcacatacattttgtcggcattggtggtgccggtatgggcggtattgccgaagttctggccaatgaaggttatcagatcagtggttccgatttagcgccaaatccggtcacgcagcagttaatgaatctgggtgcgacgatttatttcaaccatcgcccggaaaacgtacgtgatgccagcgtggtcgttgtttccagcgcgatttctgccgataacccggaaattgtcgccgctcatgaagcgcgtattccggtgatccgtcgtgccgaaatgctggctgagttaatgcgttttcgtcatggcatcgccattgccggaacgcacggcaaaacgacaaccaccgcgatggtttccagcatctacgcagaagcggggctcgacccaaccttcgttaacggcgggctggtaaaagcggcgggggttcatgcgcgtttggggcatggtcggtacctgattgccgaagcagatgagagtgatgcaagcttcctgcatctgcaaccgatggtggcgattgtcaccaatatcgaagccgaccacatggatacctaccagggcgactttgagaatttaaaacagacttttattaattttctgcacaacctgccgttttacggtcgtgcggtgatgtgtgttgatgatccggtgatccgcgaattgttaccgcgagtggggcgtcagaccacgacttacggcttcagcgaagatgccgacgtgcgtgtagaagattatcagcagattggcccgcaggggcactttacgctgctgcgccaggacaaagagccgatgcgcgtcaccctgaatgcgccaggtcgtcataacgcgctgaacgccgcagctgcggttgcggttgctacggaagagggcattgacgacgaggctattttgcgggcgcttgaaagcttccaggggactggtcgccgttttgatttcctcggtgaattcccgctggagccagtgaatggtaaaagcggtacggcaatgctggtcgatgactacggccaccacccgacggaagtggacgccaccattaaagcggcgcgcgcaggctggccggataaaaacctggtaatgctgtttcagccgcaccgttttacccgtacgcgcgacctgtatgatgatttcgccaatgtgctgacgcaggttgataccctgttgatgctggaagtgtatccggctggcgaagcgccaattccgggagcggacagccgtagcctgtgtcgcacaattcgtggacgtgggaaaattgatcccattctggtgccggatccggcgcgggtagccgagatgctggcaccggtattaaccggtaacgacctgattctcgttcagggggctggtaatattggaaaaattgcccgttctttagctgaaatcaaactgaagccgcaaactccggaggaagaacaacatgactgataaaatcgcggtcctgttgggtgggacctccgctgagcgggaagtttctctgaattctggcgcagcggtgttagccggactgcgtgaaggcggtattgacgcgtatcctgtcgacccgaaagaagtcgacgtgacgcaactgaagagcatgggctttcagaaagtgtttatcgcgctacacggtcgcggcggtgaagatggtacgctgcaggggatgctcgagctgatgggcttgccttataccggaagcggagtgatggcatctgcgcttagtatggataaactacgcagcaaacttctatggcaaggtgccggtttaccggtcgcgccgtgggtagcgttaacccgcgcagagtttgaaaaaggcctgagcgataagcagttagcagaaatttctgctctgggtttgccggttatcgttaagccgagccgcgaaggttccagtgtgggaatgagtaaagtagtagcagaaaatgctctacaagatgcattaagattggcatttcagcacgatgaagaagtattgattgaaaaatggctaagtgggccggagttcacggttgcgatactcggtgaagaaattttaccgagtatacgtattcaaccgtccggaaccttctatgattatgaggcgaagtatctctctgatgagacacagtatttctgccccgcaggtctggaagcgagtcaagaggccaatttgcaggcattagtgctgaaagcatggacgacgttaggttgcaaaggatggggacgtattgacgttatgctggacagcgatggacagttttatctgctggaagccaataccagtccgggtatgaccagccacagcctggtgccgatggcggcacgtcaggcaggtatgagcttcagccagttggtagtacgaattctggaactggcggactaatatgagccaggctgctctgaacacgcgaaacagcgaagaagaggtttcttctcgccgcaataatggaacgcgtctggcggggatccttttcctgctgaccgttttaacgacagtgttggtgagcggctgggtcgtgttgggctggatggaagatgcgcaacgcctgccgctcagtaagctggtgttgaccggtgaacgccattacacacgtaatgacgatatccggcagagcatcctggcattgggtgagccgggtacctttatgacccaggatgtcaacatcatccagacgcaaatagaacaacgcctgccgtggattaagcaggtgagcgtcagaaagcagtggcctgatgaattgaagattcatctggttgaatatgtgccgattgcgcggtggaatgatcaacatatggtagacgcggaaggaaataccttcagcgtgccgccagaacgcaccagcaagcaggtgcttccaatgctgtatggcccggaaggcagcgccaatgaagtgttgcagggctatcgcgaaatggggcagatgctggcaaaggacagatttactctgaaggaagcggcgatgaccgcgcggcgttcctggcagttgacgctgaataacgatattaagctcaatcttggccggggcgatacgatgaaacgtttggctcgctttgtagaactttatccggttttacagcagcaggcgcaaaccgatggcaaacggattagctacgttgatttgcgttatgactctggagcggcagtaggctgggcgcccttgccgccagaggaatctactcagcaacaaaatcaggcacaggcagaacaacaatgatcaaggcgacggacagaaaactggtagtaggactggagattggtaccgcgaaggttgccgctttagtaggggaagttctgcccgacggtatggtcaatatcattggcgtgggcagctgcccgagccgtggtatggataaaggcggggtgaacgacctcgaatccgtggtcaagtgcgtacaacgcgccattgaccaggcagaattgatggcagattgtcagatctctagcgtatatctggcgctttctggtaagcacatcagctgccagaatgaaattggtatggtgcctatttctgaagaagaagtgacgcaagaagatgtggaaaacgtcgtccataccgcgaaaagcgtgcgtgtgcgcgatgagcatcgtgtgctgcatgtgatcccgcaagagtatgcgattgactatcaggaagggatcaagaatccggtaggacttagcggcgtgcggatgcaggcaaaagtgcacctgatcacatgtcacaacgatatggcgaaaaacatcgtcaaagcggttgaacgttgtgggctgaaagttgaccaactgatatttgccggactggcaagtagttatagcgtattgacggaagatgaacgtgaactgggtgtctgcgtcgtcgatatcggtggtggtacaatggatatcgccgtttataccggtggggcattgcgccacactaaggtaattccttatgctggcaatgtcgtgaccagtgatatcgcttacgcctttggcacgccgccaagcgacgccgaagcgattaaagttcgccacggttgtgcgctgggttccatcgttggaaaagatgagagcgtggaagtgccgagcgtaggtggtcgtccgccacggagtctgcaacgtcagacactggcagaggtgatcgagccgcgctataccgagctgctcaacctggtcaacgaagagatattgcagttgcaggaaaagcttcgccaacaaggggttaaacatcacctggcggcaggcattgtattaaccggtggcgcagcgcagatcgaaggtcttgcagcctgtgctcagcgcgtgtttcatacgcaagtgcgtatcggcgcgccgctgaacattaccggtttaacggattatgctcaggagccgtattatagcacggcggtgggattgcttcactatgggaaagagagtcatcttaacggtgaagctgaagtagaaaaacgtgttacagcaagtgttggcagctggatcaagcgactcaatagttggctgcgaaaagagttttaatttttatgaggccgacgatgattacggcctcaggcgacaggcacaaatcggagagaaactatgtttgaaccaatggaacttaccaatgacgcggtgattaaagtcatcggcgtcggcggcggcggcggtaatgctgttgaacacatggtgcgcgagcgcattgaaggtgttgaattcttcgcggtaaataccgatgcacaagcgctgcgtaaaacagcggttggacagacgattcaaatcggtagcggtatcaccaaaggactgggcgctggcgctaatccagaagttggccgcaatgcggctgatgaggatcgcgatgcattgcgtgcggcgctggaaggtgcagacatggtctttattgctgcgggtatgggtggtggtaccggtacaggtgcagcaccagtcgtcgctgaagtggcaaaagatttgggtatcctgaccgttgctgtcgtcactaagcctttcaactttgaaggcaagaagcgtatggcattcgcggagcaggggatcactgaactgtccaagcatgtggactctctgatcactatcccgaacgacaaactgctgaaagttctgggccgcggtatctccctgctggatgcgtttggcgcagcgaacgatgtactgaaaggcgctgtgcaaggtatcgctgaactgattactcgtccgggtttgatgaacgtggactttgcagacgtacgcaccgtaatgtctgagatgggctacgcaatgatgggttctggcgtggcgagcggtgaagaccgtgcggaagaagctgctgaaatggctatctcttctccgctgctggaagatatcgacctgtctggcgcgcgcggcgtgctggttaacatcacggcgggcttcgacctgcgtctggatgagttcgaaacggtaggtaacaccatccgtgcatttgcttccgacaacgcgactgtggttatcggtacttctcttgacccggatatgaatgacgagctgcgcgtaaccgttgttgcgacaggtatcggcatggacaaacgtcctgaaatcactctggtgaccaataagcaggttcagcagccagtgatggatcgctaccagcagcatgggatggctccgctgacccaggagcagaagccggttgctaaagtcgtgaatgacaatgcgccgcaaactgcgaaagagccggattatctggatatcccagcattcctgcgtaagcaagctgattaagaattgactggaatttgggtttcgaggctctttgtgctaaactggcccgccgaatgtatagtacacttcggttggataggtaatttggcgagataatacgatgatcaaacaaaggacacttaaacgtatcgttcaggcgacgggtgtcggtttacataccggcaagaaagtcaccctgacgttacgccctgcgccggccaacaccggggtcatctatcgtcgcaccgacttgaatccaccggtagatttcccggccgatgccaaatctgtgcgtgataccatgctctgtacgtgtctggtcaacgagcatgatgtacggattagtaccgtagagcacctcaatgctgctctcgcgggcttgggcatcgataacattgttatcgaagttaacgcgccggaaatcccgatcatggacggcagcgccgctccgtttgtatacctgctgcttgacgccggtatcgacgagttgaactgcgccaaaaaatttgttcgcatcaaagagactgttcgtgtcgaagatggcgataagtgggctgaatttaagccgtacaatggttttagcctggatttcaccatcgattttaaccatccggctattgattccagcaaccagcgctatgcgatgaacttctccgctgatgcgtttatgcgccagatcagccgtgcgcgtacgttcggtttcatgcgtgatatcgaatatctgcagtcccgtggtttgtgcctgggcggcagcttcgattgtgccatcgttgttgacgattatcgcgtactgaacgaagacggcctgcgttttgaagacgaatttgtgcgtcacaaaatgctcgatgcgatcggtgacttgttcatgtgtggtcacaatattattggtgcatttaccgcttataaatccggtcatgcactgaataacaaactgctgcaggctgtcctggcgaaacaggaagcctgggaatatgtgaccttccaggacgacgcagaactgccgttggccttcaaagcgcctagtgctgtactggcataacgacatttatactgtcgtataaaattcgactggcaaatctggcactctctccggccaggtgaaccagtcgtttttttttgaattttataagagctataaaaaacggtgcgaacgctgttttcttaagcacttttccgcacaacttatcttcattcgtgctgtggactgcaggctttaatgataagatttgtgcgctaaatacgtttgaatatgatcgggatggcaataacgtgagtggaatactgacgcgctggcgacagtttggtaaacgctacttctggccgcatctcttattagggatggttgcggcgagtttaggtttgcctgcgctcagcaacgccgccgaaccaaacgcgcccgcaaaagcgacaacccgcaaccacgagcctagtgccaaagttaactttggtcaattggccttgctggaagcgaacacacgccgcccgaatagcaactattccgttgattactggcatcaacatgccattcgcacggtaatccgtcatctttctttcgcaatggcaccgcaaacactgcccgttgctgaagaatctttgcctcttcaggcgcaacatcttgcattactggatacgctcagcgcgctgctgacccaggaaggcacgccgtctgaaaagggttatcgcattgattatgcgcattttaccccacaagcaaaattcagcacgcccgtctggataagccaggcgcaaggcatccgtgctggccctcaacgcctcacctaacaacaataaacctttacttcattttattaactccgcaacgcggggcgtttgagattttattatgctaatcaaattgttaactaaagttttcggtagtcgtaacgatcgcaccctgcgccggatgcgcaaagtggtcaacatcatcaatgccatggaaccggagatggaaaaactctccgacgaagaactgaaagggaaaaccgcagagtttcgtgcacgtctggaaaaaggcgaagtgctggaaaatctgatcccggaagctttcgccgtggtacgtgaggcaagtaagcgcgtctttggtatgcgtcacttcgacgttcagttactcggcggtatggttcttaacgaacgctgcatcgccgaaatgcgtaccggtgaaggaaaaaccctgaccgcaacgctgcctgcttacctgaacgcactaaccggtaaaggcgtgcacgtagttaccgtcaacgactacctggcgcaacgtgacgccgaaaacaaccgtccgctgtttgaattccttggcctgactgtcggtatcaacctgccgggcatgccagcaccggcaaagcgcgaagcttacgcagctgacatcacttacggtacgaacaacgaatacggctttgactacctgcgcgacaacatggcgttcagccctgaagaacgtgtacagcgtaaactgcactatgcgctggtggacgaagtggactccatcctgatcgatgaagcgcgtacaccgctgatcatttccggcccggcagaagacagcagcgaaatgtataaacgcgtgaataaaattattccgcacctgatccgtcaggaaaaagaagactccgaaaccttccagggcgaaggccacttcagcgtggacgaaaaatctcgccaggtgaacctgaccgaacgtggtctggtgctgattgaagaactgctggtgaaagagggcatcatggatgaaggggagtctctgtactctccggccaacatcatgctgatgcaccacgtaacggcggcgctgcgcgctcatgcgctgtttacccgtgacgtcgactacatcgttaaagatggtgaagttatcatcgttgacgaacacaccggtcgtaccatgcagggccgtcgctggtccgatggtctgcaccaggctgtggaagcgaaagaaggtgtgcagatccagaacgaaaaccaaacgctggctagcatcaccttccagaactacttccgtctgtatgaaaaactggcggggatgaccggtactgctgataccgaagctttcgaatttagcagtatctacaagctggataccgtcgttgttccgaccaaccgtccaatgattcgtaaagatctgccggacctggtctacatgactgaagcggaaaaaattcaggcgatcattgaagatatcaaagaacgtactgcgaaaggccagccggtgctggtgggtactatctccatcgaaaaaagcgagctggtgagtaacgaactgaccaaagccggtattaagcacaacgtcctgaacgccaaattccacgccaacgaagcggcgattgttgctcaggcaggttatccggctgcggtgactatcgcgaccaatatggcgggtcgtggtacagatattgtgctcggtggtagctggcaggcagaagttgccgcgctggaaaatccgaccgcagagcaaattgaaaaaattaaagccgactggcaggtacgtcacgatgcggtactggaagcaggtggcctgcatatcatcggtaccgagcgtcacgaatcccgtcgtatcgataaccagttgcgcggtcgttctggtcgtcagggggatgctggttcttcccgtttctacctgagcatggaagatgcgctgatgcgtatttttgcttccgaccgagtatccggcatgatgcgtaaactgggtatgaagccaggcgaagccattgaacacccgtgggtgactaaagcgattgccaacgcccagcgtaaagttgaaagccgtaacttcgacattcgtaagcaactgctggaatatgatgacgtggctaacgatcagcgtcgcgccatttactcccagcgtaacgaactgttggatgtcagcgatgtgagcgaaaccattaacagcattcgtgaagatgtgttcaaagcgaccattgatgcctacattccaccacagagcctggaagaaatgtgggatattccggggctgcaggaacgtctgaagaacgatttcgacctcgatttgccaattgccgagtggctggataaagaaccagaactgcatgaagagacgctgcgtgagcgcattctggcgcagtccatcgaagtgtatcagcgtaaagaagaagtggttggtgctgagatgatgcgtcacttcgagaaaggcgtcatgctgcaaacgcttgactccctgtggaaagagcacctggcagcgatggactatctgcgtcagggtatccacctgcgtggctacgcacagaaagatccgaagcaggaatacaaacgtgaaagcttctccatgtttgcagcgatgctggagagcttgaaatatgaagttatcagtacgctgagcaaagttcaggtacgtatgcctgaagaggttgaggagctggaacaacagcgtcgtatggaagccgagcgtttagcgcaaatgcagcagcttagccatcaggatgacgactctgcagccgcagctgcactggcggcgcaaaccggagagcgcaaagtaggacgtaacgatccttgcccgtgcggttctggtaaaaaatacaagcagtgccatggccgcctgcaataaaagctaactgttgaagtaaaaggcgcaggattctgcgccttttttataggtttaagacaatgaaaaagctgcaaattgcggtaggtattattcgcaacgagaacaatgaaatctttataacgcgtcgcgcagcagatgcgcacatggcgaataaactggagtttcccggcggtaaaattgaaatgggtgaaacgccggaacaggcggtggtgcgtgaacttcaggaagaagtcgggattaccccccaacattttagcctatttgaaaaactggaatatgaattcccggacaggcatataacactgtggttttggctggtcgaacgctgggaaggggagccgtggggtaaagaagggcaacccggtgagtggatgagcctggtcggtcttaatgccgatgattttccgccagccaatgaaccggtaattgcgaagcttaaacgtctgtaagtcagataaggcgttttcgccgcatccgacattcgcacacgatgcctgatgcgacgctggcgcgtcttatcaggcctaaagggatttctaactcattgataaatttgtttttgtaggtcggataaggcgttcacgccgcatccgacatttgcacaagatgcctgatgcgacgctgtccgcgtcttatcaggcctacgtgcggcatcagacaaatgtcactgctttggttcttcgctccagtcatcgctttcggaaagatcgccactgctggggattcgtttttcttcagcagcccattctccgaggtcgatcagctgacaacgtttggagcaaaatggccgaaacgggctgatttcaccccacaccaccgttttcccgcaggttgggcaattcaccgtaatagtttcactcatttttactccttagcaacaggccagttcgaaatccagacgttccggtacctgtccgttttcagtgtccagcggcataaaacgaatggcaaaacggctcttatgtccggaaatttgcggataaagctgactatcgaggctcagattcaggcgcagcaagtcggcatcgccaccgttatcctgataaaaaccattcaggctggtttgtttacggaagggggcgctctggcgaattaaatccagcaccatggtaagtgcctgggtgagcgggttcaggctggcaatccaggtttctacctggctgtcgcgctgcgcctggggtagatgcagccaaatgtgcaatgtaggtaaatcaaagctgcaacagccgcctgggatgctcagtcgctgacgcaccagagcaatcaaacgatcttcacgcagaaattgcccgatacgcggcgcggaaattaatacgctccccgccgcttttaactgctgaattaatgcttcaatacggctctggtccacgccaggcacgccaatccaggtctggagtttacgttgctgccggtcaagttctttcaacagctcagtgcggacttcgccgcgctcgaaaacatccagtaattcactgacattacggaagaaatgcagcgcgccagcgtggtcaacgatgggtaaattaacggtgagttgctgaatcaaaaactcaatgcgcagccatgtacgcattttttcatttagtggatgttcaaaaaggacctgggtctgcattacggtttttcctgactgacaaactggctcgcaagctgcaaatagtgtgcgtgcaggcgggcaacatcgcttgcgatagcatccggtgcgccgttattatcaatgacgtcatctgccacggcaaggcgggcttcgcgcgttgcctgagcagcaaggatttgttcgacatgctcgcgagttacatcatcgcgctgcatggtgcgcttaagttgcgtttctgggctgacatccaccacaagcactcgattcgcttttttatacagactgttttctaccagcaatggcacaacccacagtacatagggggaagtagcttgctggatctggtgttgcgtctcttgctgaatcagcggatgcagcagggcgttaagccagtttttctcttccgggttggcgaagatccgctcgcgcaaggcccggcgctgcaatgttccatcagcagcaatcatgttagcgccaaagtgatcagcaatggcatgtagcgcaggtgcacctggttcaaccacctgacgcgcaataatatcggcatcaatgacgttaattccgagatcagcaaacgcattggcaacggtactcttgccactgccaatgcctcccgttaaggcaactatatacctcataatttatattcccgggaattcatcatgattatcaaaacgttaaaaatgagtgcacgaaagcgaaattgatgaaacgttcgctcactatttaccaggtaaatttatgggattgtagcgtaaaaaaagacaatttcgcagtcttgcgccgcattgattagtgcgtatgatagcgtcactggagttgcgctcttacccttatagccattaaccccaggaatccgcacatgcgtattgaagaagatctgaagttaggttttaaagacgttctcatccgccctaaacgctccactcttaaaagccgttccgatgttgaactggaacgtcaattcaccttcaaacatagtggtcagagctggtccggcgtgccgattatcgccgcaaatatggacaccgtaggcacattttctatggcctctgcgctggcttcttttgatattttgactgctgtgcataaacactattctgtcgaagagtggcaagcgtttatcaacaattcttccgctgatgtgctgaaacatgtgatggtttctaccggtacgtctgatgcggatttcgaaaaaactaaacagattctcgacctgaacccggcattaaacttcgtttgtattgacgtggcgaatggttattccgaacacttcgtgcagttcgttgcgaaagcgcgtgaagcgtggccgaccaaaaccatttgtgctggtaacgtagtgactggtgaaatgtgtgaggagcttatcctcagtggtgccgatatcgttaaagttggcattggcccaggttctgtttgtacaactcgcgtcaaaacaggcgtcggttatccgcaactttctgcggtaatcgaatgtgccgatgctgcgcacggtctgggcggaatgatcgtcagcgatggtggctgcaccacgccgggcgatgtggcgaaagcctttggcggcggtgccgatttcgtcatgcttggcggcatgctggcgggccacgaagagagcggcggtcgcatcgttgaggagaacggcgagaaatttatgctgttctacggcatgagctccgagtctgcgatgaaacgtcacgttggcggcgttgcggaatatcgcgcagcagaaggtaaaaccgttaagctgccgctgcgaggcccggttgaaaataccgcgcgagatattttgggcggcctgcgtagtgcttgtacatacgttggggctagtcgcctgaaagagctgaccaagcgcaccacgtttattcgtgtgcaggaacaagaaaaccgcatcttcaacaacctgtaatctcccaacgctggcgtggagcaacacgccagcgttatcccatcccactcatcgcatcgcctaaatggaaaattggcagatacattgccaccaccagcgtaccaataattcctcccgttatgatcagcaacgccggttccagtaaggctgcgaggttatccgccagcgccattgtgttttcccgatgatgatgggcgaggttgtctaacatgagatccagagagccggatgcctctcctgttctcactaattgcaaacagagcgggctaaactcaccggtattttttagcgccagccagatgggttgaccgttactgatatcgtgctggatttgtgtcagaagttgcacccagtacgggcagcgcattgtttctctgacgctctctacgccctgtaaaaaagtaatgcctgcactttgtgtcagcgccagaatcgtaaagatctgcgtgagtttttgtccccgcatcagactacccataatcgggatgcgtaacagcaatttctgccgcactataagccaggtcggtcggcgcatcagcaacttattggctatcgccagcagaaagccgaacaacaccagcagccagctccattcgccactaaagtctgccagcgtcatgatcccctgcgttagtgccggtagtggggtgttgaaggtcttatagatagcggcaaactccggcagaacaaaatgcagcattgccacaaccaccatgattgccatcgctaaaatgatgatgggataacgtaacgcacttttcactttgtcggtcaactgacgctgggctttttgctgacgcgccagttcaaagcagcattcatccagcttaccggtcagttcacccgtgcggatcatcgcctgatagagcggcggaaatacctcactccagggtaataaggcattggaaaaagcaatgccctgttcgagatcgtgcgccaggctttgcagcaacgcttgccattgcttactgggatgctgttccgccagcagagccagcccttcagaaagcgttaaccctgctttgagtagcgtcgccagttgatgaatgacttccgcgcttttatctcctcgccactgcgcagaattgatggcgattcgcttcaggcttagtggggtaaccatctgttgctgtagtgccataagcagtaaagtacggctctctgcccatagcatcccatcttgcgcattgccgtcgccggttatgccatgccagcgccagagttgcttactcgccatgcggcatcctcagtacgcggattaactcttcaaaggtggttaagccttgctctacggccaggcagccgttttcaaaaagcgtacgcatacccgcctgtcgtgcgtgcgtttccaggctttcaacgtcggtattagcggaaataagctgacgaatgaccggcgttatgggcagaacttcaaataaggccgtacgaccataaaaaccgtggtagcaatgtacacaaccgggtgcctgccagtggggcagcgggcttggccatacattgtctggaatgtggatgggctccccttgctgccggcgacaatgtgggcaaagtttgcgtaccagacgctgggctattaccagcgtaagcgcgctacttagcatccagcgggcgacccccatttgctgtaaacgtaccagcgtttcgcaggtggaattagtgtgtagggtagacaacaccaggtgaccagtttgcgccgctttaatagcgatctctgctgtttcgccatcgcggatctctccgatcatgatgacgtcaggatcctggcgcaataacgcacgcaaaacgccctgaaaggtgagtccggcacgcggatggatttgcgtctggtttagtccggctatggggatctcaactggatcttcgacgctacaaatattaatgtcagcggtattcagcttttgcagggcactataaagcgtgaccgttttgccgctgccggtagggccagttaccagcaccagtccctgtggttgttgcaaggcatgagcaaagtccgccagttgtaacggctgcattccaagcgtgttgacatccagtgcctgacccacctgctgtaacaaccttaataccaccttttcaccaccccgacatggtaaggtcgcaatacgaaaactgacggcgtttcctgccagttcgacagtgaattgcccgtcctgcggcaggcgatgttccgcaatatccaggtttcccagcacttttaatctggcggttaatgcgactccggcatccggactaacatccggtaaaggatgcaatacgccgtcgatacgcaagcggatgcggtaggcattgtccgctggttcgatatgaatatcagacgcgcgttgttccagcgcagattgtaacgttcgagttagcaactctgctttgggctgatgcttctcctgaacagctacgggcagtgtctgttgtgtgcgactggcgtgaccttccatttgttggcgcgtccagcaggtgatctcaatacgtttggtggtagcgaaatgcaatgcgtccagtagctcatggctaggtgcatcgactaccgcaacatgaaccacctcttcgctggcatccagcaagactccatgataacgcagacacagggcagtgagctgtggaatattcattgccgctccttagttggcgtcatcaaagcggaagacatcttcgcaggcttgctgcaatgcgctgtcactttgaatattgcagttgcgcgtccagccggtgacgccgtttgcgttatcccaacccggtgtcatgacgacgcttagcccattgagactttcttgcccggtcaggctcaccacgccctttgccacactcatggcactaacatagcgggtggtggtagggctgggaatgccattgctgccaccgtcgcaggtatctaatccaccatgttccagcgcgcacaactctacggcggtacggtaaggcacaaaggtttgtagcatgtcggtgagtgcggctttgcgcaggtagttttgataagcgggaataccaatggcgcttaaaatggcaatgatgccaataaccaccatcagttcgataagtgtaaaaccgcgttgcttgtccatctgtttcgctccttgatttggttggcgctactttggcaaacgccatcagcacaggcgaggggcaaaaaacgaaacgggaaagcagattccgaggttttttatttcgttgcagcgaaagacaagaaatttgcgaggcgttacgaagaaagttggggaaggggagattatccgcccgcgatggagcggataaatctgtcaactattagcgaaaacgcatactaaggtcgagtgcttgtacgtgtttagttagcgcaccgacggagataaagtccacgcccgtttcggcaaattcacgcagtgttttgtcagtgacgttgccagacacttccagtagcgccttgccgttggtgcgtttgacggcttcgcgcatctgttctgtttcgaagttatccagcatgatgatatcggctcctgctttcagggcttcatcaagttcttccagattctctacttcgacttctactggcgcatccgggtgcagccaggacgctttttcgaccgcctggcgcacactgccggaggcaataatatggttttctttgatcaggaaggcatcagaaagccccagacggtgattcgctccgccgccgcaaagtaccgcgtatttcagagcactacgcaggccgggtaaggttttgcgcgtatccaacaactgcgtgttggtgccttccagcaattcgacatagtggcgtaccttactggcaactccactaagggtttgcacaaaattaagcgcagtgcgttcgcccgttaacagcacgcgggatgggccttcaagttcgaacaaggattgattggcattgatgacatcgccgtcatccacatgccagattatggtgacatcgtcgcctgccagttgaataaacacctcttcaacccagcgtttgccgcaaaagacgccattctcgcgggtgatcaccgtggcatgagagcgagaattttccggtaaaagttttgccgtaatatcattgttggcatcgactgttccgcctaaatcttcccgcagcgcctgggccaccgcgccggggatatcgagattaatgcgttccagcagctcgtcacgtcgggtgtcagggttatagcggcgaggcggcatgttaaaactccagatagctaacgaatcataaggtagaaacatgctactctgaaccgggtattagcaccacatataaggagatcctgcatgttgttagaacaggggtggctggttggcgcgcgccgcgttcccagtccacattacgattgccgcccggatgacgaaacacccaccctgctggtggtgcacaatattagcctgccgccaggcgagtttggcggtccgtggatcgacgcattattcactggaactattgatccgcaggcacatcctttctttgctgagatcgcccatttgcgcgtctccgctcactgtttgattcgccgtgatggtgaaatagtccagtatgttcctttcgataaacgtgcatggcatgcgggagcctctcagtatcaggggcgcgaacgctgcaatgatttttctattgggattgagcttgaaggcaccgatacgctggcgtataccgatgcgcagtatcaacagcttgcggcggttacgcgggcactgattgattgctatccggatatcgctaaaaacatgacgggccattgtgatattgcgccggatcggaaaaccgatcccggtcctgcatttgattgggcacggtttcgtgtgctggtcagcaaggagacaacatgacgctatttacaaccttactggtgttaattttcgagcgcctgtttaagttgggcgagcactggcagcttgatcatcgtcttgaagcgttctttcggcgggtgaaacatttttctctcgggcgcacgttaggcatgaccattattgcgatgggcgtgacttttttactgttacgcgcattgcagggagtattgttcaacgttcccacgctactggtgtggctgctgattggtttgctgtgtattggcgcaggtaaagttcgtcttcattatcatgcttatctgacagctgctagtcgtaatgatagccatgcccgtgccacgatggctggcgaactcaccatgattcacggcgtcccggcaggctgcgacgaacgtgagtatttgcgtgagctgcaaaatgcattgctgtggattaactttcgtttttatcttgcaccgctgttctggctgattgtggggggaacctggggacccgttacgctgatggggtatgcgtttttgcgtgcatggcaatactggctggcgcgatatcagacgccgcatcatcgtttacagtccggcattgatgccgtgcttcatgtactggattgggtgccggttcgtcttgcgggtgtggtatatgccttgatcggtcatggtgagaaagcgttaccggcctggtttgctagcctgggtgatttccatactagccagtatcaggtgttaacgcgtctggcgcagttctctctggcgcgtgaaccgcatgtcgataaggtggagacgccgaaggcagcggttagtatggcgaagaaaaccagcttcgtggtcgtggtggtgattgcactactgacgatttacggggcgttggtgtaaagattattgccctcaccctgtacgggtgagggcgtagagagattaatgcgcttttacggctttggcggttttctctttaaacagatagccgatacctaacacgatcagccataccgggatcaggtatacgctaatcgccattcctggggtcatcagcataatcaccagtaccgccgccataaacagcaggcagatccagttacccagcggataaagcagagcagggaagcgagttaccacgccttgttcctgcttggcgcgacggaatttcatatgcgccaggctaatcatcgcccagttgattaccagtgcagataccaccagcgccattaacagtccgaaagcggactctggggcaaggtagttaatcagtacgcacaacgccgttaccagtgcagacaccagaatggtatttactggtacaccacgtttatcgacagacgccagcgcttttggcgcattaccctgttgtgccagaccaaacagcatacggctgttgcaatatacgcagctgttgtacacggagagcgccgcagtcagtaccacgatgttcagcgcattcgccacaaaggtatcgcctaactcgtggaagatcagcacaaacggactggtatcggcggtaacgcgggtccacggcatcagactgagcagaacggctaagctaccaatatagaaaatcaggatgcggtagataacctggttagttgctttcggtatactttgctccgggttatcagcttctgctgcggtgatccccaccagttccagaccaccgaagctgaacatgataatcgccatcatcatcaccagcccggtgaagccgtgcggcaggaaaccaccctgatcccacaggttgctaacggtcgcctgcgggccgccgttgccactgaatagcagccagccgccgaagatgatcatcgctaccaccgcgataactttgataatggcaaaccagaactccatctcgccaaacactttaacgttggtcaggttgatggcgttaatcaccacaaagaatacggcggcagaaacccaggtggggatttccggataccagaactgaatgtatttacccacggcagtcagctcagccatggcaactaaaacgtacagtacccagtagttccagccagaggcgaaaccggcaaaactgccccagtatttataagcaaagtggctaaaggagcctgcgacaggttcttcgaccaccatttcacccagctgacgcatgatcagaaaggcgataaaaccagcaatggcgtaacccaggataatccctggccctgcggactgtattacggaggcgctacccaggaataacccggtccctatcgcgccacccagcgcgataagctgaatatggcggtttttaaggccgcgctttagctgctcgccgtgctgttgaccttccatcatgaaacctcgtgcggtggttgtttttttgatctacgcagtgatgcgtgtgtaagtttgcaattccgtttgttgtattaatttgtttacatcaaagaagtttgaattgttacaaaaagacttccgtcagatcaagaataatggtatgcggcagcgaatgcacccgctttatgcatggttgaagatgagttgcttaaaaagaaaccgtttgtaaagctcagcctcaacccctctcaatatgtagaatgaatttaaattcgttttaattgaattaaaaatcacaaaattggtaagtgaatcggttcaattcggatttttatagtttaataatcgttaaaaaactcctttcctacgtaaagtctacatttgtgcatagttacaactttgaaacgttatatatgtcaagttgttaaaatgtgcacagtttcatgatttcaatcaaaacctgtatggacataaggtgaatactttgttactttagcgtcacagacatgaaattggtaagaccaattgacttcggcaagtggcttaagacaggaactcatggcctacagcaaaatccgccaaccaaaactctccgatgtgattgagcagcaactggagtttttgatcctcgaaggcactctccgcccgggcgaaaaactcccaccggaacgcgaactggcaaaacagtttgacgtctcccgtccctccttgcgtgaggcgattcaacgtctcgaagcgaagggcttgttgcttcgtcgccagggtggcggcacttttgtccagagcagcctatggcaaagcttcagcgatccgctggtggagctgctctccgaccatcctgagagtcagtatgacttgctcgaaacacgacacgccctggaaggtatcgccgcttattacgccgcgctgcgtagtaccgatgaagacaaggaacgcatccgtgaactccaccacgccatagagctggcgcagcagtctggcgatctggacgcggaaagtaacgccgtactccagtatcagattgccgtcaccgaagcggcccacaatgtggttctgcttcatctgctaaggtgtatggagccgatgttggcccagaatgtccgccagaacttcgaattgctctatagccgtcgcgagatgctgccgctggtgagtagtcaccgcacccgcatatttgaagcgattatggccggtaagccggaagaagcgcgcgaagcaagccatcgccatctggcctttatcgaagaaattttgctcgacagaagtcgtgaagagagccgccgtgagcgttctctgcgtcgtctggagcaacgaaagaattaatgatttttctggtaaaaattatccagaagatgttgtaaatcaagcgcatataaaagcgcggcaactaaacgtagaacctgtcttattgagctttccggcgagagttcaatgggacaggttccagaaaactcaacgttattagatagataaggaataacccatgagtgaacgtttcccaaatgacgtggatccgatcgaaactcgcgactggctccaggcgatcgaaagcgtcatccgtgaagaaggtgttgagcgtgctcagtatctgatcgaccaactgcttgctgaagcccgcaaaggcggtgtaaacgtagccgcaggcacaggtatcagcaactacatcaacaccatccccgttgaagaacaaccggagtatccgggtaatctggaactggaacgccgtattcgtagtgctatccgctggaacgccatcatgacggtgctgcgtgcgagcaaaaaagacctcgaactgggcggccatatggcgtccttccagtcttccgcaaccatttatgatgtgtgctttaaccacttcttccgtgcacgcaacgagcaggatggcggcgacctggtttacttccagggccacatctccccgggcgtgtacgctcgtgctttcctggaaggtcgtctgactcaggagcagctggataacttccgtcaggaagttcacggcaatggcctctcttcctatccgcacccgaaactgatgccggaattctggcagttcccgaccgtatctatgggtctgggtccgattggtgctatttaccaggctaaattcctgaaatatctggaacaccgtggcctgaaagatacctctaaacaaaccgtttacgcgttcctcggtgacggtgaaatggacgaaccggaatccaaaggtgcgatcaccatcgctacccgtgaaaaactggataacctggtcttcgttatcaactgtaacctgcagcgtcttgacggcccggtcaccggtaacggcaagatcatcaacgaactggaaggcatcttcgaaggtgctggctggaacgtgatcaaagtgatgtggggtagccgttgggatgaactgctgcgtaaggataccagcggtaaactgatccagctgatgaacgaaaccgttgacggcgactaccagaccttcaaaagcaaagatggtgcgtacgttcgtgaacacttcttcggtaaatatcctgaaaccgcagcactggttgcagactggactgacgagcagatctgggcactgaaccgtggtggtcacgatccgaagaaaatctacgctgcattcaagaaagcgcaggaaaccaaaggcaaagcgacagtaatccttgctcataccattaaaggttacggcatgggcgacgcggctgaaggtaaaaacatcgcgcaccaggttaagaaaatgaacatggacggtgtgcgtcatatccgcgaccgtttcaatgtgccggtgtctgatgcagatatcgaaaaactgccgtacatcaccttcccggaaggttctgaagagcatacctatctgcacgctcagcgtcagaaactgcacggttatctgccaagccgtcagccgaacttcaccgagaagcttgagctgccgagcctgcaagacttcggcgcgctgttggaagagcagagcaaagagatctctaccactatcgctttcgttcgtgctctgaacgtgatgctgaagaacaagagcatcaaagatcgtctggtaccgatcatcgccgacgaagcgcgtactttcggtatggaaggtctgttccgtcagattggtatttacagcccgaacggtcagcagtacaccccgcaggaccgcgagcaggttgcttactataaagaagacgagaaaggtcagattctgcaggaagggatcaacgagctgggcgcaggttgttcctggctggcagcggcgacctcttacagcaccaacaatctgccgatgatcccgttctacatctattacagcatgttcggcttccagcgtattggcgatctgtgctgggcggctggcgaccagcaagcgcgtggcttcctgatcggcggtacttccggtcgtaccaccctgaacggcgaaggtctgcagcacgaagatggtcacagccacattcagagcctgactatcccgaactgtatctcttacgacccggcttacgcttacgaagttgctgtcatcatgcatgacggtctggagcgtatgtacggtgaaaaacaagagaacgtttactactacatcactacgctgaacgaaaactaccacatgccggcaatgccggaaggtgctgaggaaggtatccgtaaaggtatctacaaactcgaaactattgaaggtagcaaaggtaaagttcagctgctcggctccggttctatcctgcgtcacgtccgtgaagcagctgagatcctggcgaaagattacggcgtaggttctgacgtttatagcgtgacctccttcaccgagctggcgcgtgatggtcaggattgtgaacgctggaacatgctgcacccgctggaaactccgcgcgttccgtatatcgctcaggtgatgaacgacgctccggcagtggcatctaccgactatatgaaactgttcgctgagcaggtccgtacttacgtaccggctgacgactaccgcgtactgggtactgatggcttcggtcgttccgacagccgtgagaacctgcgtcaccacttcgaagttgatgcttcttatgtcgtggttgcggcgctgggcgaactggctaaacgtggcgaaatcgataagaaagtggttgctgacgcaatcgccaaattcaacatcgatgcagataaagttaacccgcgtctggcgtaagaggtaaaagaataatggctatcgaaatcaaagtaccggacatcggggctgatgaagttgaaatcaccgagatcctggtcaaagtgggcgacaaagttgaagccgaacagagcctgatcaccgtagaaggcgacaaagcctctatggaagttccgtctccgcaggcgggtatcgttaaagagatcaaagtctctgttggcgataaaacccagaccggcgcactgattatgattttcgattccgccgacggtgcagcagacgctgcacctgctcaggcagaagagaagaaagaagcagctccggcagcagcaccagcggctgcggcggcaaaagacgttaacgttccggatatcggcagcgacgaagttgaagtgaccgaaatcctggtgaaagttggcgataaagttgaagctgaacagagcctgatcaccgtagaaggcgacaaggcttctatggaagttccggctccgtttgctggcaccgtgaaagagatcaaagtgaacgtgggtgacaaagtgtctaccggcagcctgattatggtcttcgaagtcgcgggtgaagcaggcgcggcagctccggccgctaaacaggaagcagctccggcagcggcccctgcaccagcggctggcgtgaaagaagttaacgttccggatatcggcggtgacgaagttgaagtgactgaagtgatggtgaaagtgggcgacaaagttgccgctgaacagagtctgatcaccgtagaaggcgacaaagcttctatggaagttccggcgccgtttgcaggcgtcgtgaaggaactgaaagtcaacgttggcgataaagtgaaaactggcagcctgattatgatcttcgaagttgaaggcgcagcgcctgcggcagctcctgcgaaacaggaagcggcagcgccggcaccggcagcaaaagctgaagccccggcagcagcaccagctgcgaaagcggaaggcaaatctgaatttgctgaaaacgacgcttatgttcacgcgactccgctgatccgccgtctggcacgcgagtttggtgttaaccttgcgaaagtgaagggcactggccgtaaaggtcgtatcctgcgcgaagacgttcaggcttacgtgaaagaagctatcaaacgtgcagaagcagctccggcagcgactggcggtggtatccctggcatgctgccgtggccgaaggtggacttcagcaagtttggtgaaatcgaagaagtggaactgggccgcatccagaaaatctctggtgcgaacctgagccgtaactgggtaatgatcccgcatgttactcacttcgacaaaaccgatatcaccgagttggaagcgttccgtaaacagcagaacgaagaagcggcgaaacgtaagctggatgtgaagatcaccccggttgtcttcatcatgaaagccgttgctgcagctcttgagcagatgcctcgcttcaatagtagcctgagcgaagacggtcagcgtctgaccctgaagaaatacatcaacatcggtgtggcggtggataccccgaacggtctggttgttccggtattcaaagacgtcaacaagaaaggcatcatcgagctgtctcgcgagctgatgactatttctaagaaagcgcgtgacggtaagctgactgcgggcgaaatgcagggcggttgcttcaccatctccagcatcggcggcctgggtactacccacttcgcgccgattgtgaacgcgccggaagtggctatcctcggcgtttccaagtccgcgatggagccggtgtggaatggtaaagagttcgtgccgcgtctgatgctgccgatttctctctccttcgaccaccgcgtgatcgacggtgctgatggtgcccgtttcattaccatcattaacaacacgctgtctgacattcgccgtctggtgatgtaagtaaaagagccggcccaacggccggcttttttctggtaatctcatgaatgtattgaggttattagcgaatagacaaatcggttgccgtttgttgtttaaaaattgttaacaattttgtaaaataccgacggatagaacgacccggtggtggttagggtattacttcacataccctatggatttctgggtgcagcaaggtagcaagcgccagaatccccaggagcttacataagtaagtgactggggtgagggcgtgaagctaacgccgctgcggcctgaaagacgacgggtatgaccgccggagataaatatatagaggtcatgatgagtactgaaatcaaaactcaggtcgtggtacttggggcaggccccgcaggttactccgctgccttccgttgcgctgatttaggtctggaaaccgtaatcgtagaacgttacaacacccttggcggtgtttgcctgaacgtcggctgtatcccttctaaagcactgctgcacgtagcaaaagttatcgaagaagccaaagcgctggctgaacacggtatcgtcttcggcgaaccgaaaaccgatatcgacaagattcgtacctggaaagagaaagtgatcaatcagctgaccggtggtctggctggtatggcgaaaggccgcaaagtcaaagtggtcaacggtctgggtaaattcaccggggctaacaccctggaagttgaaggtgagaacggcaaaaccgtgatcaacttcgacaacgcgatcattgcagcgggttctcgcccgatccaactgccgtttattccgcatgaagatccgcgtatctgggactccactgacgcgctggaactgaaagaagtaccagaacgcctgctggtaatgggtggcggtatcatcggtctggaaatgggcaccgtttaccacgcgctgggtagtcagattgacgtggttgaaatgttcgaccaggttatcccggcagctgacaaagacatcgttaaagtcttcaccaagcgtatcagcaagaaattcaacctgatgctggaaaccaaagttaccgccgttgaagcgaaagaagacggcatttatgtgacgatggaaggcaaaaaagcacccgctgaaccgcagcgttacgacgccgtgctggtagcgattggtcgtgtgccgaacggtaaaaacctcgacgcaggcaaagcaggcgtggaagttgacgaccgtggtttcatccgcgttgacaaacagctgcgtaccaacgtaccgcacatctttgctatcggcgatatcgtcggtcaaccgatgctggcacacaaaggtgttcacgaaggtcacgttgccgctgaagttatcgccggtaagaaacactacttcgatccgaaagttatcccgtccatcgcctataccgaaccagaagttgcatgggtgggtctgactgagaaagaagcgaaagagaaaggcatcagctatgaaaccgccaccttcccgtgggctgcttctggtcgtgctatcgcttccgactgcgcagacggtatgaccaagctgattttcgacaaagaatctcaccgtgtgatcggtggtgcgattgtcggtactaacggcggcgagctgctgggtgaaatcggcctggcaatcgaaatgggttgtgatgctgaagacatcgcactgaccatccacgcgcacccgactctgcacgagtctgtgggcctggcggcagaagtgttcgaaggtagcattaccgacctgccgaacccgaaagcgaagaagaagtaatttttcgtttgccggaacatccggcaattaaaaaagcggctaaccacgccgctttttttacgtctgcaatttacctttccagtcttcttgctccacgttcagagagacgttcgcatactgcactccgttgctcgttattcagcctgacagtatggttactgtcgtttagacgttgtgggcggctctcctgaactttctcccgaaaaacctgacgttgttcaggacttgcgctttgaacacgctggcgggcgttatcacgttgctgttgattcagtgggcgctgctgtactttttccttaaacacctggcgctgctctggacttgcggactgaatacgctcacgcgctgcgtctcttcgctgctggttctgcgggttagtctgcattttctcgcgaaccgcctggcgctgctcagggctggcggactgaatgcgctcacgcgctgcctctcttcgctgctggatcttcgggttagtctgcattctctcgcgaactgcctggcgctgctcagggctggcggactgataacgctgacgagcggcgtccttttgttgctgggtcagtggttggcgacggctgaagtcgtggaagtcgtcatagctcccatagtgttcagcttcattaaaccgctgtgccgctgcctgacgttgggtatctcgtgtaatgactggtgcggcgtgtgttcgttgctgaaactgatttgctgccgcctgacgctggctgtcgcgcgttggggcaggtaattgcgtggcgctcattccgccgttgacatcggtttgatgaaaccgctttgccatatcctgatcatgatagggcacaccattacggtagtttggattgtgccgccatgccatattcttatcagtaagatgctcaccggtgatacggttgaaattgttgacgtcgatattgatgttgtcgccgttgtgttgccagccattaccgtcacgatgaccgccatcgtggtgatgataatcatcattgtcatgatgatgatggtcatgatcgtcgtcgtcccagtcgatgctgctgaatagtgcgtacgtggtagcaacgcccatgctatagccgaatccgcgtacaaagctgtcaacaaacggttctccggctggtggtggcagataaaccggcggatacgcagtattggcccagttcccgtaaaccacggttgggttgtagttgggaatatagaccacatcaggattggcgggctcaatggaaatgacggttgttgccggctctgtaatgacggggttggcagttaaaactgtattggatggtatgacgggtgccgtgactgtctgttttaccggtacagctttcttcgttgtggtaataactttctgttcggtactactcttcaggctgccggtttgttgcgccagttgccgcaatcgctgtacgctgtccatcacgtcctgcggctgggccagaaaagcatcgcccaggttttgcacccattgcgggttttcgcccatcaatgccatcaattgtggaaaggccaccagacttttaacgctggcgtcccacggctggtcagataccgcctgaatagcagcatcgccttgtttaagtggattatcgtggctccattgcactgcttgagcaacgtttgtcggataggtacttgccatcagcacctggctaagtagggcgtcgggatacagcgcgacgggcgcgacccattgatctatttgtgcagtgctgaatgcggatttgacgacggcgggtgttacgggaggtgcggaaaccgttgcaggaaacgtaaccgcggcagcgtcagacacagccagttgtgtgctttgcggttccacaggcgcttccactgtgcggctttttatatatagcccggtagaggcggcacaaagcccggcactgcaaattagcgccagcacatggggtttaaacggcaaagtcattttcataattcggatctcaaggaaatcgcaatggtcggcgaactgccacccgcaggtgctgtgaatccgagtataaagaggcggtagtttaaattttgactaatcttgggattcgttgagaaaggtgattatcaccatgcgaattaacgaagtttttacggagggaaacaatctctagaccatccttaacgattcagccacttttttatgttgcttttttgtaaacagattaacacctcgtcaaaatcctgctattctgcccgttgcggtactgggcatttaccctacaaactgctgtctcacaggagcgtgaagagaatcgcctgccgcactatgacaatgagagcgaggagaaccgtcgtgctagaagaataccgtaagcacgtagctgagcgtgccgctgaggggattgcgcccaaacccctggatgcaaaccaaatggccgcacttgtagagctgctgaaaaacccgcccgcgggcgaagaagaattcctgttagatctgttaaccaaccgtgttcccccaggcgtcgatgaagccgcctatgtcaaagcaggcttcctggctgctatcgcgaaaggcgaagccaaatcccctctgctgactccggaaaaagccatcgaactgctgggcaccatgcagggtggttacaacattcatccgctgatcgacgcgctggatgatgccaaactggcacctattgctgccaaagcactttctcacacgctgctgatgttcgataacttctatgacgtagaagagaaagcgaaagcaggcaacgaatatgcgaagcaggttatgcagtcctgggcggatgccgaatggttcctgaatcgcccggcgctggctgaaaaactgaccgttactgtcttcaaagtcactggcgaaactaacaccgatgacctttctccggcaccggatgcgtggagtcgcccggatatcccactgcacgcgctggcgatgctgaaaaacgcccgtgaaggtattgagccagaccagcctggtgttgttggtccgatcaagcaaatcgaagctctgcaacagaaaggtttcccgctggcgtacgtcggtgacgttgtgggtacgggttctagccgtaaatccgccactaactccgttctgtggtttatgggcgatgatattccacatgtgccgaacaaacgcggcggtggtttgtgcctcggcggtaaaattgcacccatcttctttaacacgatggaagacgcgggtgcactgccaatcgaagtcgacgtctctaacctgaacatgggcgacgtgattgacgtttacccgtacaaaggtgaagtgcgtaaccacgaaaccggcgaactgctggcgaccttcgaactgaaaaccgacgtgctgattgatgaagtgcgtgctggtggccgtattccgctgattatcgggcgtggcctgaccaccaaagcgcgtgaagcacttggtctgccgcacagtgatgtgttccgtcaggcgaaagatgtcgctgagagcgatcgcggcttcagcctggcgcaaaaaatggtaggccgtgcctgtggcgtgaaaggcattcgtccgggcgcgtactgtgaaccgaaaatgacttctgtaggttcccaggacaccaccggcccgatgacccgtgatgaactgaaagacctggcgtgcctgggcttcagcgctgacctggtgatgcagtctttctgccacaccgcggcgtatccgaagccagttgacgtgaacacgcaccacacgctgccggacttcattatgaaccgtggcggtgtgagcctgcgtccgggtgacggcgtcattcactcctggctgaaccgtatgctgctgccggataccgtcggtaccggtggtgactcccatacccgtttcccgatcggtatctctttcccggcgggttctggtctggtggcgtttgctgccgcaactggcgtaatgccgcttgatatgccggaatccgttctggtgcgcttcaaaggcaaaatgcagccgggcatcaccctgcgcgatctggtacacgctattccgctgtatgcgatcaaacaaggtctgctgaccgttgagaagaaaggcaagaaaaacatcttctctggccgcatcctggaaattgaaggtctgccggatctgaaagttgagcaggcctttgagctaaccgatgcgtccgccgagcgttctgccgctggttgtaccatcaagctgaacaaagaaccgatcatcgaatacctgaactctaacatcgtcctgctgaagtggatgatcgcggaaggttacggcgatcgtcgtaccctggaacgtcgtattcagggcatggaaaaatggctggcgaatcctgagctgctggaagccgatgcagatgcggaatacgcggcagtgatcgacatcgatctggcggatattaaagagccaatcctgtgtgctccgaacgacccggatgacgcgcgtccgctgtctgcggtacagggtgagaagatcgacgaagtgtttatcggttcctgcatgaccaacatcggtcacttccgtgctgcgggtaaactgctggatgcgcataaaggtcagttgccgacccgcctgtgggtggcaccgccaacccgtatggacgccgcacagttgaccgaagaaggctactacagcgtcttcggtaagagtggtgcgcgtatcgagatccctggctgttccctgtgtatgggtaaccaggcgcgtgtggcggacggtgcaacggtggtttccacctctacccgtaacttcccgaaccgtctgggtactggcgcgaatgtcttcctggcttctgcggaactggcggctgttgcggcgctgattggcaaactgccgacgccggaagagtaccagacctacgtggcgcaggtagataaaacagccgttgatacttaccgttatctgaacttcaaccagctttctcagtacaccgagaaagccgatggggtgattttccagactgcggtttaaaaagtcagcgcacgcgctgcgcataaacgacacaatgcccggtgaatgagattcccgggcatttttttatttctaaaccatcgccgttccgctgtttttctccggtaaggctgcgataattacatcaatggcgcaatgcgatttcggtgcattgccgggagcagaggaacacactatggattacgaatttctgcgcgatattaccggagtggtaaaggtgcgtatgtccatggggcatgaagtggtcgggcactggtttaatgaagaggtgaaagaaaacctggccttgcttgatgaagtggaacaagcagcgcacgcactgaaaggtagcgaacggtcctggcaacgggcagggcatgaatacaccctgtggatggacggtgaagaggtgatggttcgcgccaatcaactggaattcgctggcgatgaaatggaagaggggatgaactactacgacgaagaaagcctgagcctatgcggcgttgaggattttctgcaggtcgtggcggcttaccgcaatttcgtgcagcagaagtaaataaatctggcggagcctgggagctccgccagagccgttaaacagctggcatattgcgcccgtaataaatctcgcgcatttctttccacagcgcagcggtaatttcctggcgctcgctgtcggttaagtcttccggtttggtgtggaacatgtagtgcttaaggtcgaactctttaagcaacatcttggtatggaagatattttcctgatagacgttcacatccaccatgtcatacagcgccttcatatcgtcagacataaagttctgaatgctattaatctcatggtcgataaagtgcttcataccgttaatgtcgcgggtaaaaccgcgcacgcgataatcaatggttacgatatcggactcaagctggtggatcaggtaattcagcgccttcagcggagaaatcacgccgcaggtagagacttcaatatcggcgcggaaggtacataaaccgccttcaggatgactttccgggtaggtatgtacgcaaatatgacttttatcaagatgggcaacgaccgtttctggcagtgggccggggtgttctgttttgtcgatgagtttcgggtcaaccggttcttcactcaccagaatagtgacgctggcaccctgtggttcgtaatcctggcgggcgatgttaagaatattagccccgataatggaacaggtttcactcaggatttcggtcagacggttggcattatagagttcatcgatataagcaatataaccgtcgcgctcttcggcagttttggcgtagcagatatcgtaaatacaaaaactcagacttttggtcagattattaaagccatgcagtttcagttttttcaatttcttatcttctccttaggacggctgactagccagtgcgtcttgcagatactgaggtaaggcaaaagctgccgtatggattgccggattgtaataacggcatttcaggccagaggcgagaaaacgcgcctgaataatttcggtactgagatggcgtaaggcgtcgttatctgtcgcccatgcaaaagtcatgataccgccgtaataggtcgggatcgccgcctgataaaagccaacgtcgctgaagtaatggctgagtttgcgatggctgtcgatggcttcttcctgctgtaaaaagcagacgccgttttgtgcgacgaagataccgccaggattcaggcaacgtttgcagccttcataaaatgcgctagtgaaaaggctttcgccgggaccgataggatcggtgcagtcggagataatgacatcaaaggtctggctggtttgattaacgaaattgacgccatcgtcgatcaccagcttaaagcgcggatcgtcgtagctaccggcgttatggttgggtagatactgacggcagaagcttacgacacccgcatcgatttccaccatcgtgatactctcaacgtttttatgtcgggttacttcacgcagcatggcaccgtcgccgccgccgataatcagcacatgtttcgcgtgaccatgggccagtagcggaacatgggtcatcatctcatgatagataaactcgtcgcgctcggtggtttgtactacgccatccagcgccattacgcgaccaaatgcagcgttctcaaaaatgatcagatcctggtgatcggtcttttcatgatacagaacgttatctaccgcaaagtactgcccaaactggtcgtgtagcgtttcatgccactgttttttttcggccatgggttgatacctcctttgttaacacccgtaaaaaaagggcgcaacataatagctaacattgaccgcggatgcacggtcaatatttctacaaaaaggtatcagggattatttgacgtaggcaagcaggcttaaggaatcgcgggccagggctttgcattttttagcgacgggaatgccaatgccgctgagatcgcggtagctgtcttcaccgagggctttcatgtcgaaggtgtcgtaattactgaggtcccactggttttgctgagcgaaaaagaccagtgcgcgacgaatttgcccgttaggtaagttctggtaaccacaatcgttcttcagaaagacaaaaactgccgttaaatcggccatatcttcggcttcagactcgctgagcgcgtaactgtttgcgcagacggccatcaggctgccgaataacactgttctgaaaaacgtcttcattgcttctaccaggggcttaaagaagataaacgttagcacactgcgagcgaggcgacgaccattattgtcgattaaattgtgtctgcggcttgaccttcccgtaaggggaaggactatgctcaacgtttgattttgtttcgcctgcttaagaataaggaaataactatgcaacgtcgtgatttcttaaaatattccgtcgcgctgggtgtggctagcgctttgccgctgtggagccgcgcagtatttgcggcagaacgcccaacgttaccgatccctgatttgctcacgaccgatgcccgtaatcgcattcagttaactattggcgcaggccagtccacctttggcgggaaaactgcaactacctggggctataacggcaatctgctggggccggcggtgaaattacagcgcggcaaagcggtaacggttgatatctacaaccaactgacggaagagacaacgttgcactggcacgggctggaagtaccgggtgaagtcgacggcggcccgcagggaattattccgccaggtggcaagcgcagcgtgacgttgaccgttgatcaacctgccgctacctgctggttccatccgcatcagcacggcaaaaccgggcgacaggtggcgatggggctggctgggctggtggtgattgaagatgacgagatcctgaaattaatgctgccaaaacagtggggtatcgatgatgttccggtgatcgttcaggataagaaatttagcgccgacgggcagattgattatcaactggatgtgatgaccgccgccgtgggctggtttggcgatacgttgctgaccaacggtgcaatctacccgcaacacgctgccccgcgtggttggctgcgcctgcgtttgctcaatggctgtaatgcccgtagcctcaatttcgccaccagcgacaatcgcccgctgtatgtgattgccagcgacggtggtctgctacctgaaccagtgaaggtgagcgaactgccggtgctgatgggcgagcgttttgaagtgctggtggaggttaacgataacaaatcctttgacctggtgacgctgccggtcagccagatggggatggcgattgcgccgtttgataagcctcatccggtaatgcggattcagccgattgctattagtgcctccggtgctttgccagacacattaagtagcctgcctgcgttacctagcctggaagggctgacggtacgcaagctgcaactctctatggacccgatgctcgatatgatggggatgcagatgctaatggagaaatatggcgatcaggcgatggccgggatggatcacagccagatgatgggccatatggggcacggcaatatgaatcatatgaaccacggcgggaagttcgatttccaccatgccaacaaaatcaacggtcaggcgtttgatatgaacaagccgatgtttgcggcggcgaaagggcaatacgaacgttgggttatctctggcgtgggcgacatgatgctgcatccgttccatatccacggcacgcagttccgtatcttgagtgaaaatggcaaaccgccagcggctcatcgcgcgggctggaaagataccgttaaggtagaaggtaatgtcagcgaagtgctggtgaagtttaatcacgatgcaccgaaagaacatgcttatatggcgcactgccatctgctggagcatgaagatacggggatgatgttagggtttacggtataaaaagaccgtattcggaaatatgcccggatctctccgggcattaaactgatgacaaacgcaaatctgcctgatgcgctacgcttatcaggcctacgctagctgtgcaatccattgattttgcacaattttgtaggctggataaggcgttcacgccgcatccggcatgaacaacgcgcacgttgtcagcaatctgagcaagtcttacttcacatcatccggcagcgcataagccacaatatagtcgcccatcttcgtaccaaaactaccgtgaccgcctgcggagatcaccacatactgcttaccattcacttcataggtcattggcgtagcctgaccacccgctggtaaacgaccctgccacagtttttcaccgttgctcatgttgtaagcgcgcaggtagttatctgccgtagcggcgataaacagcacgttacccgccgtggagattggcccgcccagcatcggcatacccatattgaacggcaccggaaccggcatcgggaacggcatactgtcctgcggcgtaccaatacgtttcttccacaccacttcattagttttcagatccagcgcgctgatataaccccatgctggctgtttacatggcagaccaaatggactgaggaacgggttgagcgtgacaccatacggtacaccgtactgtggctgaatgccggattccgtacccgtgcctttggcatctttcggctgctccatcgggttgccaggaccacgcgggatcagtttgctaacaaacggcagtgccattgggttggcaatcgccacttcacgatttggatcaacggaaatcccgccccattcgaacatccccaggttacccgggaagaccagcgtaccctgttcagatggcggggtgaaaatgccttcatagcgcatctggtggaacatcacgcggcacaccagttggtcaaacatggtggctccccacatatccgcaccgctcaaatctttcgtcggacggaagctcagttcagaaaacggttgagttggggttacgtaatcgcctttcgctgcaccttggggaaccggtttttccggtgccggaaccaccagttcgccattacgacgatcgagcacaaaaatgttgccggttttcgccggagcgtaaataactggcactttctgaccattaacggtgatgtccgccagcgtcggctgtgccggaagatccatgtcccacaggtcgtggtgaacggtctggtagctccacgccagtttcccggtagtggcattcagcgccagaatgctgctggcataacgttcctgttccggtgtgcggttaccgccccagatatccggcgtggtcacgcccatcggcagatagaccagatccagcttcgcgtcataggccgctggtgcccaggagtttgggctgttaaaggtaaaggtgtgttcgtcagacgggattgcgttcggatctttcgcgccgggatcaaaagcccacagcagctccccggtgttgacatcaaaaccacggatcacgccagacgtttcgcgggtactgaagttatcggtaacactaccggccatcacgatggttttatcggtgataatcggtgggctagtcggttcatacagacccggtttggtgtctggcatattgctttgcagattgagcacgcctttattggcgaaggtttcgcacagtttgccgttttcagcgttaatcgcaatcagtcgaccatcattgaccggaagaatgatacgacgcgggcaatccgccatcacttccgggctagcggtttctgctttggcttcatgataagagacaccacggcaggttacgtgctggaaagactcgttggttttcagctcaggatcgtaatgccatttctctttgccgctggcggcatcaagcgcaaacaggcgctggtgagcggtacacaggtaaagggtgtcgcccactttaatcggcgtcacttcattggtgatttcacccggatcgttcggctgcttcacatcgccagtacggaacacccaggcttctttcagattatggacgttatcggcgttaatttgtttcagcgggctaaagcgttgaccttcctgattacgaccataggcaggccagtcctgatcggctacgggggagatagcttcagcaggtgtggcatcggcgcttaaggtgccgttgatctcctgcggatcgttaaatccggcccaggtcaggataccaccgctaatcagcagtgcgaccaccagtgcggcaactgcgccgctggcaggaatgaccaggcgacgccagacaaacggcaggatcagccagatgccgaagaagaccagaatgtcgctgcgcggagtcagcgcccagaagtcgaaaccaacttcccagacgccccaaatcatggtgccgagcagcagggctgcgtatagccaaagcgcggcgcgtttactgcgccacagcatccaggcgacgccgagcatcacaaggccagcgatagggtagtaccaggagccgccaatcgcgaccagccagcctccgccaatgagtagatacagcccgcaaagcgctgcaaaaagggctgttagcgtgacgagtaatcgtcggctgcctgtattgttaattgccataaagagacaccatttcaattcattaatattttagtagcaattaattataggttttaacatgtgtgatcgtcatcacaattcgagctttattaacagattccgcgaatgaatagttttactggtatactgcgtgtcttgcgctttgttgcggtgccaaaacctgcccgtgcgaagtgatttgtttttaaatcatatggttagagatatgaaacatactgtagaagtaatgatccccgaagcggagattaaagcgcgtatcgccgaactgggtcgtcagattactgagcgttacaaagacagcggcagcgatatggtgctggtgggtctgctgcgtggcagttttatgtttatggcggacctgtgccgtgaagttcaggtatctcatgaagtcgactttatgaccgcctccagctacggtagcggcatgtccaccacccgtgatgtgaaaatcctcaaagatctggatgaagatatccgtggcaaggacgtgctgattgttgaagatatcatcgacagcgggaatacactgagcaaagtgcgtgagatcttaagcctgcgcgaaccgaagagcctggcgatttgtacgctgctggataaaccgtcccgtcgtgaagtgaacgtcccggtagaatttatcggtttcagcatcccggatgagtttgtggtgggttacggcattgattacgcacagcgttaccgtcatctgccgtatatcggcaaagtgattctgctggacgagtaagtgtgaagttgccggatgtgttgcatccggcatggcatttttatttgtggttggcgtgtttcagcttgaggttggaaatcccgtgacggtaacgttgctcaagggtttcgcggttggtggcggtaacatccagatcacgcagcaagccgtcgtgaatgccgtaggcccagccgtgaatggtaactttctgcccgcgtttccacgcactttgcataatggtggagtggcccaggttatacacctgttccatgacgttcagttcacacaaggtatccagacggcgctcttgcggcatttcgccgagcaaactgctatgtttgaaccagatatcgcggatatgcagcagccagttgttgataagccccagttccgggttttcaactgcggcttgtacgccgccgcaaccgtagtggccacagataataatgtgttcaacttcgagtacatccactgcatactgaaccacggaaaggcagttcaggtcagtgtgaatgaccaggttagcaacattacggtgaacaaagagttcgcccggttcaagaccggttaaacgttctgcaggaacgcgactgtcggaacatccaatccatagaaagcgcggtttttgcgcttgtgccagtttctcaaaaaacccgggatcctcttccaccagcattttactccatagtgcattgttgctgatgagtgtatctatgtctttcatggaggttaacgacctgtaaccaaataattacgtttggctaatatagggcaactccgggacgatttaaaccacagataaagtgtaagaacgtaaggtaagtaaaaatttatgaccattgcactggaacttcaacagcttaaaaaaacctatccaggcggcgttcaggcgcttcgtgggatagatttgcaggtcgaagcgggtgatttttatgcgcttctcgggccgaacggggccgggaaaagcaccactatcggtattatcagctctctggtaaataaaacctccgggcgggtcagcgtatttggttacgatctcgagaaggatgtcgtgaacgctaaacgtcagttgggactggtgccgcaggaatttaacttcaacccgtttgaaaccgtgcagcaaattgtggtgaatcaggcagggtactacggcgtggagcgcaaagaagcgtacatccgcagcgaaaagtatcttaaacaactcgatctatggggaaaacgcaacgaacgtgcgcgtatgttatctggcgggatgaagcgccgtttaatgattgcccgtgcgttaatgcatgaacctaaactactgattctcgacgaaccgaccgcaggcgtggatattgaacttcgccgcagtatgtggggctttttgaaggatttaaacgacaaaggcaccaccatcattctcaccacacactacctggaagaagcagaaatgctgtgccgcaatatcggcattattcaacacggtgagctggtggaaaataccagcatgaaggcgctgctggcgaagctgaaaagcgaaacctttattctcgatctcgcaccgaaaagcccgttaccgaagctcgatggctatcagtatcgactggtcgataccgcgacgctggaagttgaagtgctgcgtgagcaggggatcaacagcgtatttacgcagttaagtgagcagggcattcaggtattaagtatgcgtaacaaagctaaccgtctggaagagctgtttgttagtctggttaatgaaaaacaaggagatcgcgcatgatgcatctttactgggtggcgctaaaaagcatctgggcgaaagagatccatcgctttatgcgtatctgggtgcagacgctggtgccgccagtcatcaccatgaccctttactttattatcttcggtaacctgattggtagccgtattggcgatatgcatggcttcagctatatgcagttcatcgtaccggggctgatcatgatgagcgtgatcaccaatgcctacgccaacgttgcgagtagtttttttggtgccaagttccagcgtaatattgaagagctgctggtagcgccggttccgactcacgtcattattgccggatatgtcggcggtggcgtggcgcgtggtctgtttgttggcattctggtgacggcaattagtctgttttttgtgccatttcaggtgcatagctgggtattcgttgccttaacgctggtgctcacggcggtgttgttctcccttgcgggtttgctgaacggtgtgtttgccaaaacgttcgatgacatcagcctggtgccaacctttgtgttaacgccactcacgtatttgggcggggtcttttacagtctgactttgttgccgccgttctggcaagggctgagccacctgaacccaatcgtttatatgatcagtggtttccgctacggcttcctcggtatcaatgatgttccgctggtcactacctttggcgtactggtggtctttattgtggcgttttatttgatctgttggagcctgatccaacgtggacgtggtttgcgtagctaaggctatttcctctcctctggatttgggggagaggagttttgacggctatcaccctttatcaacaatggtcagggtagactgattttcggctaaggaggaaggcgatgttaggttgggtaattacctgtcacgatgaccgggcgcaagagatactggatgcgctggagaaaaaacatggggcacttcttcagtgccgggccgtgaatttctggcgcggattaagctctaatatgctcagccgcatgatgtgcgatgctctgcatgaagcggactctggtgagggtgtcatcttcttaaccgatatagccggagcgccaccgtatcgcgtggctagtttattaagccacaaacactcccgttgcgaagtgatttctggtgtcacgttaccgttaattgaacagatgatggcttgccgtgaaaccatgaccagtagtgagtttcgcgagcgtattgtcgaactgggtgcgccggaggtgagtagtctttggcaccaacaacaaaaaaatccgcctttcgtcctcaaacataatttgtatgagtattaacccgcgattctgatggcgcttttgctacaataaaagcgttgtttcaccctcggttattttttcatgtacaaacaagctgttattctcctgctgatgctgtttaccgcaagtgtcagtgccgcgttacctgcccgttatatgcaaaccatcgaaaatgctgcggtctgggcgcaaattggtgacaagatggtgaccgtggggaatattcgggccggacaaatcattgccgtggagcccactgccgcaagttattacgcatttaattttggctttggcaaaggttttatcgataaaggtcatctcgagccggttcaggggcgacaaaaagttgaagacggtttgggcgacctcaacaagccgctgagtaatcagaacttagttacctggaaagatacgccggtctataacgcgccgagtgcgggaagtgcgccatttggggtactggcggacaatttgcgctacccgattttgcataaactgaaagacaggttaaatcaaacctggtatcagatccgtattggcgatcgactggcctatatcagcgcactggatgcccaacccgataatggcctgagcgtgctaacctatcaccatattctgcgcgacgaagaaaacacccgttttcgccatactagcacgaccacaagcgtacgcgctttcaataaccagatggcctggctgcgtgacaggggatacgcgacactgagcatggtgcagctggaaggctacgtgaagaataagatcaatctccctgcgcgagcggtggtgattacctttgatgatggcctcaagagcgtgagccgctatgcgtatcctgtgttgaaacaatatggcatgaaggcgacggcgtttattgttaccagtcgcatcaaacgtcacccgcagaagtggaacccaaaaagcctgcaatttatgagcgtttctgagcttaacgaaattcgcgatgtatttgatttccagagtcatacccattttttgcatcgggtagatggttatcgccgacccatattactgagccgtagtgagcacaatattctgtttgattttgcacgtagtcgccgcgctctggcgcaatttaatccgcatgtctggtatcttagctatccgtttggcggatttaatgacaacgccgtgaaggcagcaaacgatgccggatttcacctggcggtgacaaccatgaaaggcaaagtaaaaccgggggataatccgttgttactaaaacgactttatatcttaagaacggatagcctggagacgatgagccggctggtgagtaaccagccgcagggataacaatcaagcaacctgtaccggaatcgctttcgcggtacgtttcatttcattgtcgccttcaaaataggcgacgttgggtcgccaggtgcgagcttcttcatctggcatggtaacgaagctggcgatgatgacaatatcgccgacactggcgcagtgggccgccgcaccgttaacagaaataattctgctaccgcgttctgccgcgatggcataagtggagaaacgcttgccgttggtgacattccagatatcaatggcttcgttttcgagaataccggctgcgtcaagaaaatcctggtcaatggcgcaagaaccttcatagtgcaggtccgcatgagtcactttcacgcggtggagtttgccctgcagcatcgtgcgaatcataacttctacctttctaccctgtcgttaacgaagcaggcgatgcctgctttgaggaaattctcacgcagtattgcccgatttttgtttagtgtctactcatctgacggcatttgcgtcagcagtttgcgtaccgcgccgaagcgtgccatgtatcgcctgtaacgaattgatatttctctgaacgctgctcggtaaacaataaagaggtggctgacgatagcgcgccttgactggatactgccttcacgcaaagccacacggaagacagggaagatggatgcaccgagtaccacaccgcatgacgcggtatttaaacaatttttaatgcatgcggagacggctcgcgactttctggagatacatttgccagtggaattacgcgaactttgtgacctcaacacgcttcatttagagagcgggagtttcattgaagagagcctgaaaggacacagcacggacgtgctctattccgtgcaaatgcagggcaatcccggttatctgcatgttgtgattgaacaccaaagcaagccggataagaaaatggcctttcgcatgatgcgttattctatagccgccatgcaccggcatctggaggctgaccacgataagctgccgctggtggtgccgatactgttttatcagggcgaggccacaccttatccgctaagtatgtgctggtttgatatgttttacagcccggagctggcgcgacgcgtctataacagtcctttcccgctggtggatatcaccatcacaccggatgacgaaatcatgcaacatcggcggattgcgattctcgaactactgcaaaaacatattcgccagcgcgacttaatgttattgcttgagcaactggtcacgctgatcgacgaagggtacactagcggaagtcagttagttgccatgcaaaactatatgctgcaacgcggtcatactgaacaagcggatttgttttacggtgtgttgagagacagggaaacgggaggggagtctatgatgacgctggcgcagtggtttgaagagaaagggattgagaaggggattcagcagggaagacaggaagtaagtcaggaattcgcccagcgtcttctgagtaaaggaatgtctcgggaagacgttgcagagatggcaaatttacctcttgctgagattgataaggtaattaaccttatttaagttacctgtgttatgacagatgacgtggggtaaattaataactggcgccatcagccgtagcgccagttaagtattacgccagctcgaccattttgttgtcgatcaggcgagcatcgccaagccaggcggctaccagaattactgcccgtttgctggtttcagaaacttccagcaatgtgtcggcatcgcgaatctgaatatcatcggcgcggaagcctttttcattcagttcttgccccgcaatggtaataatttcatcgagatcccgttccccagcctgcaatttgtcagcaatgctacttaaaactttgtacagaccaggcgcaattttgcgttgttccgccgtcagataaccgttacgggaacttagcgccagaccgtctttggcgcgcataattggcacaccgacaatctcaatatcgaagcccatatcggcaaccattttgcggatcagcgccagttgctgaaaatctttttcaccgaagcaggcgatgtccggctggaccaggttgaacagcttgctgacaatagtgctaacgccgcgaaaatgtcccggacggctggcaccttccagcatggtgctaaggccaggaacgtcaacgtaagtgtgggtttcagtaccgttcgggtagatctcttttacgctaggggcgaaaactaaatccactttacgtttgtttagcttctcgcagtcctcctgcaaggtccgtggataacgagccagatcttccgggcggtcgaactgcatcgggttaacgaaaatactgacgacgaccacatcggcgcgggctttggcttcgtcgaccagcttcatatggccatcgtgcaggttacccatggtaggcaccagcgccacgcgcttgccttccatacgcaggcggcgaatttgctgacgcagcagcggcagggtttcgataattaacacaacgtgactccttaatggaaactgtgttcttcgcccggataaacgccggactccacttcagccatatactgccgcacagccgcgcggatgtcgcccgtttcggcgaggaaatttttagcgaatttaggaatgtgaccgccggtaataccaaaggcgtcgtgcatcacgaggatctgcccgtcagtgacgttgcctgcgccaatgccaataaccgggatcgccagtgcttcggtaatacgttttgccagttcaaccggcacgcattccagcaccagcagctgtgccccagcagcttctaaggctaatgcatcgctgagcagttgatcgcccgcttcatcgccgcgcccctgaactttgtagccaccgaaaatattcacactctgtggtgttaaacctaagtgaccacatacaggaacggcacgttcggtcagcatttgtacggtttctaccagccactcaccgccttcaattttgaccatgttagcaccggcacgcataaccgttgcggcgttttcgaaggcttgttccggcgtggcatacgccataaacggcaggtcagccagcagcaggcagtttggtgcgccgcgacgtacggcggcagtgtggtaggcgatatcggcaacggtaactggcagggtggagtcgtgcccctgaaccgtcatgcccaggctatcgcccaccagcatgacgttaagcccttcatcagcaaagagtttggcgaagctatagtcataagcggtgatggtcgcgaaacgttttttttcctgtttgtacttctgcagtaaggagatggtggtcggtttcataacgtatcctgataaattgatgttgtgctgtctggcattttatcagtcacattggtgggggcaatgatttatccgtagcagcactgccagaaggtgacagtgctgctacgttatcagggataggttacctggaaagtactggtggctttaaattcgccgggttcgatagcaatattcccgtcttgctttaatgttgcctggaaatgaagaggctgacttgtgccgttaccttgattagggtaaaccccatcggaggtgtcatcttcggtttcataatctatataaacagaattcgtatcattaggttttaatgtcattagcggatttttactggttgctaaaccttcaatgagtacgccaacgcctttggcggcagtgcttccagtaagcgtattaccaagcagttgtgtgttttgagtacctacttttccagtgacgagttttgtttcaatattacgcacacgaatacaattctgaaggctgatatcaaagggaacaggactagcgccatttttaattgtcccagagctatattctcccattctaaccgtactaccattgacacttggcccggtaagtatggaggtaaaacatgttggtaaggttaatttgacattattcagtgtgaaattgacataaatgtggttgctgtgatctacaacttttgtaccaggactgtaggccttaaagctataaaggtaattactactactggataactggacttgctgattaagtgtaggatcgaaattagtatctgtataaaattcaacagttatgttgtgtactataccaccaatagcccaaaacttatcgtagtcgtctgctttgttgcaacccttagtttgtagatcgctgtctgtgacggaaaagaaaaattcttggttggaaggatctccgatatagattcctgggctttgaatgtcagttattgtatcgtatgcagaccagaccctacttattaacatggtgtaatacagaccaggaacagatgtattaaatagtttatgtccgccataatctttaccactatagaccatggcattttcaatagttattggaccaggattcgctctgccagatgtattgcagtaaagaataccaccaccggtacctgtatccaggtaactccagtacatttttaccccagtcgggccgagctgcgtgggtttataaaaaaccaagttgcttgctgtacttgtgtaattaaaggtcatctgtgcggcagtggaggggcctcgatagttatcaactcctgcattatttcccacaataaaacttgtatatgcactgactgtattacaacaagaatacagtgctaaaaaaagaatgtacctgaagatagtcttcatttttactccaatgtttctttattgttatggtttgcgctgtttttgtttgttattcgtagtaaatatccactaacacatggctcataagttgaccagatgtaacactcaatgcaggatcgattttttgcattcgggtgctaaatttccaggaactaccattcatgtcatcgctcattactggataaacggaacgagatccgccactagcattaagaacattgaatgtattcgcgctatcctgagtagaaaatataactactcctacattacttgctccactgctaatttcattagcaaatatttgcctagagccagcagccatgacaccgctaagggctctaaaatcaatatgtaactgatttagcacatcgccagttccctgtaatgcacagtcggatacagtgatagtgaactcttttccacctggttgataactttcaggagtaacattaccactaaaatatcccaccccaacgacgccaagatcaatattaccctggttactgattccgcttttgcaggtgctgttttttacattggcaacaaggtcaatatcctgtccagcaatggctggacaggcgatgcaaaacagtaaactcagaaacagaattattctcttcatcagcttacgttgagtgggatgcatatatagttcctgaatctgtaagtctgttagttataggttactgtaaatgtggctggtgcagaaaacttacccgcagtgacattgtttacggttttatttttttccacgaccaggcgtgcactcatcggataataaacgaccgcattggctgcagtggagattgttacctcttgacttgctggtgttacacagctaaattgtgttgcactccctgttgccggagttacagtgctccagacttcaacggcgacagcacttgctttatctgcggctgtggaaccatttgcaaaccccgcaccgtcattagcagttccctcgcatgtggctcgcttggttaattttatttgcgcttttttattggggatacccgcacagtctttgaatttgagtttgaatgtttttactttggtcttggcattgatttcagaaatatatacatcaccaaaatcaacaacagaaatgtcctgatcagagtcatttactaatgtagcggtacaagtacccatttctacagtagtaataacggtcagtccaatactgtctgttgccgcataagagagtacgctgaacaaactggcagccaaaacgacactgctggataatccataacgtaaatttttaaatgtcatcataattatccttcttattgatagatgaaattaaacgtcgccagtgcacgaaaattccccggtacgccttgccctgcatctgtttcacgtagcgcaacggtcatttcaagacccttatcgggctgcatctcgtctgtgctccagcgtatcttttccgcactgttaggtttaaggaaagtggcatcatcagtagtccgttttttgaaacccataccgatattacttgtcgtgctagaactatcaccagactgcggtataataagcttaggactgctactacttgcatttccggtcagagtggtatcaatccaactgatgccactgctgcacccactggcaaccagtttaaaatcagcctgagattctgtcgttttattcgcgatcttatccagacccatcttagggattctcaatgtgtagttattattgccatcattcgtgacgttattaccagtaagtgtgatgttacaggttgtcgctttgacagtggctgtaaactctacattaatatccgttgcaaatacactgggacttaataatattcccatcagtatcactattttatgtggcgttgtttttatcatttgacgtcccttgtagttactgaatctgacaccgaattccattcagaataatagattgtgctattttttctgcttctgggctttgttgataatgcgcaagacaacttacgggtttactttgttcgagccatttaatgctgatatttccctgctgctcaataccacgaacaaatgcttgtccaccctgtccaacattaccaatgacattgccttgctcatcataaatatctgcagcaaatggaatatttttaccatcacttcgtgtgatgttcataatggcactttgcccttgcacggtttcaaaatcagcaaagacgacactaccctgacgcggtacagctactgcactggtactttttaattcaacatcgttctcaagatcgttgatatccagcgcgatacggttttcatgataaggagaaagagcgctggtgacaccataaccccatcgatcgatagtactgttgccataatttattcgcgctccttgagcacctggagcctgaactaccgccagtgtatcggagtcgctaaaactatcattactgaaagtcagtccaccgctatgcaatacaaaaccaccgtcggtgctgagagaaacttgacggctgttatcgctatttgcagaaatactacctgccagcgttccccatggactctcatagctggcataacccccaacataactcaaatctttgctggctttattcatcgtatagccagtattcacgctataactgacgcgagcgttatcgctatagccactgctgctaacgttgagttggttattacccttaaagtcactgcttatttgagtatcaatactctggaaaccactagtacgttgttcagtgccaagtaatttttcaattggaatggtgaaactaagataaacgctatcgtcagtgtcgccgtcttcattccaactacgctgggcactgacactgtagctgccccaggatgtactgttactgtagccaatagagtaattgctacgattttgtccggaagcccagtaatcggaccaacttccggaaagataaaaactaccgtaatcttttttctcaaatttcaacggttggttaatactgaccgtaacctgatttttcatgcgactgtaattacgcatggatttcggttcaagatcttgttcgggatgtttcacttcatcaattagagttagtgcatcattaagaccaaggtaattctgtgtgctatagcgataggccgcgatattcagactagtacttgtttcttcgaataacttgttccaggaaacacgataactttgcccctggtatgttttatcatccgggatacgaacattggaatgagtcacatcgaaagaaaatgcaccaacactagtattcagaccaagacctaacaaaccagcggtatagttattatcggttatctgaataccggtataacccgtcagatagttattcaggccgtagtagtagcttgcttgaaataaattaggctcatcctgaatatcatcttttaagacctgaccgccgctaatatcccaacgtccaacgccagggcgtaacatttgaacaacggaactgaaaggttggctgaatgtccgcttactgccatcggattcttcgatggtaacaataagatcgctgccgtacccactcggactcagatcatcaatgacgaaagcgcctggcggcaccgtcgtttcataaatcttatagccaccttgcgtaatagtgactttggcgttggtattggcaacgccatgaatgataggcgcaaagctggctaaagtcggaggcaacatgcggctgtcactgtataaacgaatgcctcggatactgacggaatcaaaggtttcgcccgtcgtataagactcaccaagaatgagttgagaacgcaggctggcgatatcacgctgaacataccgattcttaaaatcataattactgccagaatcggtcatccagttgtagttgccgctggcacgcagtcgccatgcacctaaattcatcccaccgttaaatgcagcataaatgctttcattttttcgaccaggggtttcactatgatatccgttgaggttgtaactcaacatggccgcattaatgccgttttcccataagcttggatcaacatagttttggtaatttttcattacccaggcttgaggaacgtctatatccagacgttgatcgttaacgtcataacgaacagaagcctgagggataatttccgtcaaattgaggcaattgccgagcgtttcatccctggcaagcagaacggctttttcgttatttatatcgggagaattaatatgaaactgcaataaattctttaatgtgatacaagcctgggcgttcttttttccttcaattgcgacaaatgtaatactttggttaatgattggttggtcgtttacataaacactgacgtcgtaaacacccggtatagcggggttaccttcactgtaccggctgagatcaatattagatgcattctgccccatcaggaaggtatggtcatattcaacgagttcagcactgaaagcagtattgcaatacagcagcgcgcaaaacgtggcgatacgggtcagatgatgataatttttagtatattctatagtcacgctatgcttcctgcggaattatatccttgcctgattacagcctggcattaccttcaattgcgccaccaaagtcattaatggcgtaaaaatgcacttttgcagaattcgctttgccattaaggccattgactttcatgacctcatcactaaatggtgcaatcattttcacatcaatcggatagcgtttaccgctagcttctaaatcaccactgctaaaagagacgtagtaaggggttggattggtcactcgtaaactcgccttaccttcactaccactccagaaccacttcagggctaacggggcttcagagggatttcccttcaatccatccgggcgatagaaaagttttatacgtgtgcgaaatgccagttgcagcaggctttgattcgcgaccttttctgcatctggttttggtggaacttccagtacgttaaaccagaacacgctctctctgtctttaggcagactggtgctggctgtgtacattaatttgattgtttgcccacgtttggcatcaatacggcttactggcggcgtagcagtaaaagggactgtaatactgccaggctcagcgttgtcatcgccagtatctaaccaactctggacaagcaacgggttattccctttattttccagacgtacgttgacacttttttgatcgcttttatatattacgcgagtaccgctaatgacaatgtccgcaatagagctactactaaaagccatacaggttacgaagcataaagctgttgtatgtttggtgttaaaaaacataaaccatccctgatagagttaattaaaacagggaataatataaaatagaaattattattccctgtatattcattcaatcaatttaactggtgaatacttactgataagtaatggtgtatgcagtgttagtttttacataaccagcagttgctgtttggtctgcgacggcacgaacgtaagacgctttaaaatcataaacagcagattttgtcgttgcatccagggctttagtatacacatcgccagggttgttaatttgaacctgtttgatagtggaaccatcaatattgtgtagagcgatattaacgccgtcagatgggttgttaatagacatgtcgttgttcaaagtccctttgctgttaccaaagaaaacagaaccgaaggtcattttagccgtgctacctggattcggatttgctttgctgcagtcaacggtgatgctgaaaggtttagctttagcgccaacggtgtcattcagtacgccagcatcgatttcaccaacggttgcggtttgcagcaggatcagaccatccttgttaccgccgtcaacgcgggtttcacaggtgttatcaacaaccagaccactgatatttaactgaccgccgtccatatcagcagaagcagtacctgcaaccatcgccagcataagaccagacagggcaaaacctaattttttagacataaaaatcctttaataaaattccattagtcagactacatgtttgaagaatgactattcatgacacaaataggagaaacaaatgttagatattaatgagcaatgatatttgttacccaaatttacaaccattgttcattaggtcgcctattgtgcactttagaagcttttgaacaaattaaatttacttaattcaaaattaagtaaaaataagttcacaagtgcaattggttagggtatggagatgggattgatatttatttataggaagttatattatttccgcaaagagatgtttaaactaaaatcgtaattaaggaaagagatgagatatgattttcagaaaatatttatattcgcaatataaataaattaccatttgtttaatttgtcaaatgctcttgtatgtaagatttgacgcaacatctccccatcaggaaacaccaactccggcgcgatttcaaacagcggccacagcataaatccacgattcttcatatcgtagtgcggaacggtcaggcgttcagtatttatcacttcattaccaaacagcatgatgtcgagatccagcgtgcgtggtccccagcgttcagctttgcggacgcgaccttgctgcaattcaatacgctgtgtgtgattgagtagctcttcaggtgcaagagaggtttccagcgccacggctgcgtttaagtaatcgggttgatcttgcggccccagcggtggggtgcggtaaaagctagaaacggtaagaatgtggctttcagggatatcgcctaatgctttcagggcagcattgacctgctccagcggagaggccagattgctgcctatggcaatatacgccactgtcatgcggtaccctcacgacgtggtgcgcgtttgcgtggacgacgagtacgacgacgcggactcggttcttcatccagctcgttgagcatccctttttggtctggtggcgcggaaacctggaactcaccccaccatttcaccagacgctgcagttcagcgttacgctcaacttcagctcgcaaggccaacaggtcataagccgcacggaacttaggatgctccagcagtttccatgcgcgtttaccctgacgacgggacatacgcaactgcaactgccagatatcgcgggttaatgtcgtcagacgtttcgggattgccagactacggcaggcttcgtccagcacgtcgttcatcgccagcgcgaaagcgtcgtgataggtcaggccgctttcctgggcgatcttctgtgccgtctccagcagtgggtaccagaacatggcggcaaacaggaacgccgggttcacgcgcatatcgttatggatacgcgtatcggtattcttcagcacctgttcaatgatccgctccatcgggctgtcgccattttccgtgaagtagcgggtaatggtcgggaacagcggctggaacagatgatattcacacaacagcttataggtttcgtaaccgtagcccgcttgtagcagtttaaggctttcttcaaacaggcgtgccggtgggatatcgttcagcagggtagcgaggcgagggatcggttctgcggtttccgggctgatgcgcatacccaatttggcggcaaaacgtaccgcgcgcagcatacgtaccggatcttcacggtagcgcgtttccgggttaccaatcagacggataacgccgtccttcagatccttcatgccgccaacgtaatcacggacggtaaaatccgctacgctgtaatacaggctgttgatagtgaaatcgcggcgctgggcgtcttcttcgatggagccgaaaatgttgtcgcgcagcaacatgccgttttgcccgcgttgggaggtcgtgcggtcgctgacgttaccttcgtggtgtccacggaaggtcgcaacttcgataatctccgggccaaacattacatgagccagacggaaacggcgacccaccaggcggcagttacggaacagtttgcgcacctgctcaggcgtggcgttagtggttacgtcaaaatctttcggctttttgccaagtaacaggtcgcgcacgccgccgccaaccagccaggcttcgtatcccgctttattgagcctgtacattaccttcagggcattttcactgatatctttgcgggaaatagcatactgctcacgcgggatcaccgtcacctgtggacgggcgactgcctgttcagcctcgctttcctcgcggcttagcaccttgcggcaaaaattagcgactcgggtaaaaatagtacacctcggtagtgtcaaacatcattcaggacaaaaaaatagcggctaatcatagctcagcaactcgcattactgaatgtactatttacaattgcgctctcgggcacggcggtaagccgccagtttttgacggcactctgaaggatttgctcgacgctgaaatcctgccagtgtgcttctgcctgctgccccagaaattgaagtgccgcgattagtaccgggcgtggatcgcctttcggcaacgcaggcgcatgattctgcttggaaagtttagcgccttgtggattaagcgccagcggcagatgaatgtaatctggcactttccagccaaaaagctggtacaggctgatttgccttactgttggttcaatcagatcagccccacgcactatttctgtaacgccctggaaatgatcatcaaccacaacagccaggttgtaggcgaacaacccatcacggcgatgaatgataaaatcttcccgtgccagtttttcgtcggcgtgaataatgccgcgcagctggtcagtaaattgcgtgaccggatgctgctggcggatacgcactgcggcgttgtctggtccatgatgcaacacccggcaatgaccgtcgtaaataccgccaatgctttgaatacgcgcacgcgtacaggtgcagtaataacttagtccttgttcatgtaaccaggcgagtgcttcacgataggcgtcgtgacgttggctttgccagagaacatcgccgtcccagtgcagaccgtaatgttccagctggcgcaggatagtttctgcggcaccgggaacttcacgaggcgggtcgatatcttctatgcgtaccagccagcgaccttgccgggcgcgagcctgcaaatagctgccgagcgcggcgatcagagagccaaaatgaagctcgccggaaggagagggggcgaagcggccaatatactgtgtgtctgtcatctctttgaacaaaaaataaggcgggagcatttcccgcctgtggtaaacgtgatggaacggctgtaattagccagccatctgtttttcgcgaatttcagccagcgttttgcagtcgatgcacagatcggctgtcgggcgcgcttccagacggcgaataccaatttcaacaccgcaggattcgcagtagccgaaatcttcgtcttccacttttttcagcgtcttctcgatctttttgatcagcttacgctcgcgatcgcggttacgcagttcgaggctgaactcttcttcctgggctgcacggtctaccgggtccgggaagttggctgcttcatcctgcatatgtgtaacggtgcgatcgacttcatccctgagttgattacgccatgcttccagaatacgacggaagtgcgccagctgggcttcattcatatactcttcgcccggcttctcctgatatggttccaccccagcgatggcgagaatactcagggagcttgttttacggttttgcccttcttgcatgttgcttctccttaacacgcactatcgatccccatgttcgggggaaaaatgaggccgctataaatagcagatgcttttccggatagcaattatctaaacgtaacacttgacaactgtgtgaggaaaagcgtatttgcgcacgcgaccagaatgtaaattaaccagttacttactttattacaatgtaaccggcagactttttttaagagccatgccttcagcagaaatttccgctttgtaagccagaatttctacccccctctgttgagcttcactcaatagttgcgcgtatttctcatcgatgtggcgcgcgggactaaaccgtgtaatggcactatgcagcacggcgaaaaagataaccgcacgctggccttcagccgctacgctcatcaactcccgaaggtgtttctgacctcgttcagtgaccgcatcgggaaaatatccctgttcgttctccgctaacgtaacgcttttcacttcaatatagcagtctggacggctatccgcctgcaacataaagtcaatacggctgcgttctgcgccgtattttacttcgcttttcaggctgctatagccactcagttcactaatactttcattaaggatagcctctttcgtcaacctgttagcccaaagcgtgttgacgcaaataaatgcgccgctctggctttgagttaattcccaggtgtgtgggtatttccgtttggtgttgtcactagtgctataccagacggtatcgccaggcgttgcacaaccggtcatcgcacccgtattcgggcagtgtagcgttaattcgcgaccatcgggtgtgatcacatcggctaaaaaacgtttgtaacgctgaattagcgtcgcgcgctgtagagggggagaaaattccattgcgacaatccttgttattgcgttagcgcccagcgttttagcggcgtgtagcgtgtgcgtccacgggcaaagctggaggcgtaaagggtgaactccgtcaccgcatagctccagttaaaacctggcggcgggattgtcaccgcctcgctggcgtcgcgcaataaggtaatatgtggatgaaacggacgattgctttgaaaacaaccgctgcgggcagcctgactacggagcatattcgccagctggattaagccgcgtggcggctgacgcatccctaaccacaccacacggctacgcagccattgtccggcgtcatcaagcgtgagtgtgaaaccaggttgacgaatccgtccggctaaaagagaaagcgccttctctttctcggcgctcacttcgcctaaaaatgccagagtcagatgcaaattatcggcggcgaccggacgtcccgcctcaggtgggaagtgtgtggcgcgccaatggataatctgttcgcggatttctgcaggtaagtcgatagcaaagaacagacgttgcggttcagacatgtgaggcactcggttatgaattaccgcgatgctacaatgtggcgcgaagaatgttaaccctctggagcgttttgtgagcagcttgcccgttgctgccgtcttacctgaattacttaccgctctcgattgtgcgccgcaggtattattaagtgcgccgaccggggccgggaaaagtacctggctgccgctgcaactgctggcgcatcccggcattaacgggaaaattatcctgctggagccgcgtcgtctggcggcgcgtaacgtcgcgcaacggctggcggagctgcttaacgaaaagccaggcgataccgttggctaccggatgcgtgcgcaaaactgcgtcgggccgaatacccgcctggaagtggttaccgaaggcgtgctgacgcgcatgatccagcgtgacccggaactgagcggtgttggactggtgatccttgatgaatttcatgagcgcagcttgcaggcggatttggcgttggcgctgttactcgatgtgcaacaaggtctgcgtgatgaccttaaactgctgattatgagcgctaccctggacaacgaccgcttgcagcaaatgctgccagaagcgcctgtcgtcatcagtgaagggcgcagctttccggttgaacgccgttatttaccgctgcccgcgcatcagcgttttgacgatgccgttgcggtagccaccgctgaaatgctgcgtcaggaaagcggaagtttactgttatttttacctggcgtcggagaaattcagcgtgtgcaggaacaactggctagccgcatcggcagtgatgtattgctctgcccgctgtatggcgcgttgagcctgaacgatcagcgaaaagcgatcctcccggcaccgcaagggatgcgcaaagtggtgctggcgaccaatattgctgaaaccagtttaaccattgaaggtattcgtctggtggtggattgtgcccaggagcgtgtggcgcgttttgatccgcgcacggggcttacgcgactgattactcaacgcgttagccaggcatccatgacgcagcgtgccgggcgcgccgggcgtctggagccgggtatcagcctgcatttaatcgccaaagaacaagcagaacgcgccgcggcgcaaagtgaaccggagatcttacaaagcgatctttccggtttgctgatggaattactgcaatggggatgcagcgatccggcgcagatgagctggctggatcaaccgccagtagtgaatctactggccgcgaaacgtctgttacaaatgctgggggcactggagggtgaacggcttagtgcgcaagggcaaaaaatggcagcgctgggtaacgatccgcgtttagcggcaatgctggttagcgcgaagaacgacgacgaagctgctaccgcggcaaaaattgccgccattctcgaagagccgccacggatgggcaatagtgacctgggcgtggcgtttagccgcaatcaaccagcctggcagcaacgtagtcagcaactgttaaaacgcttaaacgtacgtggcggtgaggcagacagtagccttatcgcgccgctacttgccggggcgtttgccgatcgcattgctcgtcgccgtgggcaagatggacgctatcaactggcaaacggcatgggagcgatgctcgatgccaacgacgcgctaagccgccacgaatggttgatcgcaccgttattattgcagggcagcgccagcccggatgcgcggattttactggcgctgctggtcgatattgatgagttagtacaacgctgcccgcagctggtacagcagtctgacactgtggagtgggatgacgcgcaaggtacgctgaaagcctggcgtcggctacaaatcggtcagttgacggtgaaagtgcagccgctggcgaaaccgagtgaagacgagttgcatcaggcgatgcttaatggcatccgtgataaaggtttaagcgtgctcaactggacggcggaagcggaacagctacgcttgcgtttgttatgcgccgcaaagtggttgccggaatatgactggccagcggttgatgatgaaagtttattggcagcgctggaaacgtggctgctgccacatatgactggcgtacatagtctacgcggcctgaaaagtctcgacatttatcaggcactacgcggattacttgattggggaatgcagcaacgtctggatagtgaattgcctgcgcattacactgtgccgacgggaagccggatcgccattcgttatcatgaagataacccgcccgcgctggcggtgagaatgcaagagatgtttggcgaggccaccaatccgacgatcgcccaggggcgcgtgccgctggtgctggagttgcttagtcctgcccaaaggccattacaaatcacacgagatttgagcgacttctggaaaggagcgtaccgtgaggtgcaaaaagagatgaaagggcgttatcccaaacatgtctggccggacgacccggcaaatactgcaccgacgcgacggacgaaaaagtatagctaaggttggttttctccctctccctgtgggagagggccggggtgagggcatcagcgcgcacgttcaccctcaccctaaccctctccctcaagggagaggggaccgatcgagcacaaattttgagagatatcttcttctgtcttgtaacagaagaacagaaaatcgggcttttgcgcctgaatattgcggagaaaaagcatggccgggaatgaccgcgagccaattggacgcaaagggaaaccgacgcgtccggtcaaacaaaaggtaagccgtcgtcgttacgaagatgacgatgattacgacgattatgatgactatgaggatgaagaaccgatgccgcgcaaaggtaagggcaaaggcaaagggcgtaagcctcgtggcaaacgcggctggctatggctactgctaaaactggctatcgtttttgccgtgctgatcgccatttacggcgtttatctcgatcaaaaaattcgtagccgtattgatggcaaggtctggcaactgcctgcggcagtttatggccgaatggtcaatcttgagccagacatgaccatcagcaagaacgagatggtgaagctgctggaggcgacccagtatcgtcaggtgagcaaaatgacccgtcctggcgaatttaccgtgcaggccaacagcattgagatgattcgccgtccgtttgatttcccggacagtaaagaaggacaggtgcgcgcgcgtctgacctttgatggcgatcatctggcgacgatcgtcaatatggagaacaaccgtcagttcggtttcttccgtcttgatccgcgtctgatcaccatgatctctagcccaaacggtgagcagcgtctgtttgtgccgcgcagtggtttcccggatttgctggtggatactttgctggcgacagaagaccgtcatttttacgagcatgatggaatcagtctctacagtatcggacgtgcggtgctggcaaacctgaccgccggacgcacggtacagggtgcgagtacgctgacgcaacagctggtgaaaaacctgttcctctccagcgagcgttcttactggcgtaaagcgaacgaagcttacatggcgctgatcatggacgcgcgttacagcaaagaccgtattcttgagctgtatatgaacgaggtgtatctcggtcagagcggcgacaacgaaatccgcggcttcccgctggcaagcttgtattactttggtcgcccggtagaagagctaagcctcgaccagcaggcgctgttagtcggtatggtgaaaggggcgtccatctacaacccgtggcgtaacccaaaactggcgctggagcgacgtaatctggtgctgcgtctgctgcaacagcaacagattattgatcaagaactctatgacatgttgagtgcccgtccgctgggggttcagccgcgcggtggggtgatctctcctcagccagcctttatgcaactggtgcgtcaggagctgcaggcaaaactgggcgataaggtaaaagatctctccggcgtgaagatcttcactacctttgacagcgtggcccaggacgcggcagaaaaagccgccgtggaaggcattccggcactgaagaaacagcgtaagttgagcgatcttgaaactgcgattgtggtcgtcgaccgctttagtggtgaagttcgtgcgatggtcggaggttctgagccgcagtttgcgggctacaaccgtgcgatgcaggcgcgtcgtagcattggttcccttgcaaaaccagcgacttatctgacggccttaagccagccgaaaatctatcgtctgaatacgtggattgcggatgcgccaattgcgctgcgtcagccgaatggccaggtctggagtccgcagaatgatgaccgtcgttatagcgaaagcggcagagtgatgctggtggatgcgttgacccgtagcatgaacgtgccgacggtaaatctggggatggcgctggggctgcctgcggttacggagacctggattaaactgggcgtaccgaaagatcagttgcatccggttccggcaatgctgctgggggcgttgaacttaacgccaatcgaagtggcgcaggcattccagaccatcgccagcggtggtaaccgtgcaccgctttctgcgctgcgtagcgtaatcgcggaagatggcaaagtgctgtatcagagcttcccgcaggcggaacgcgctgttccggcgcaggcggcgtatctgacactatggaccatgcagcaggtggtacaacgcggtacgggtcgtcagcttggggcgaaatacccgaacctgcatctggcagggaaaacagggactaccaacaataacgtagatacctggtttgcgggcattgacggcagcacggtgaccatcacctgggtcggccgtgataacaaccagccgaccaaactgtatggtgccagcggggcaatgagcatttatcagcgttatctggctaaccagacgccaacgccgctgaatcttgttccgccagaagatattgcagatatgggcgtggactacgacggcaactttgtttgcagcggtggcatgcgtatcttgccggtctggaccagcgatccgcaaagcctgtgccagcagagcgagatgcagcagcagccgagtggcaatccgtttgatcagtcttctcagccgcagcaacagccgcaacagcaacctgctcagcaagagcagaaagacagcgacggtgtagccggttggatcaaggatatgtttggtagtaattaacatctaagcgtgaaataccggatggcgagttgccatccggtaaaataacatcccatctaagatattaaccctttcttttcatctggttgtttattaacccttcaggaacgctcagattgcgtaccgcttgcctgtaagactcaatgtaagccgtgccaaaatatgatggctaggacgagctagaacccgccagcgtttcgaatattatcttatctttataataatcattctcgtttacgttatcattcactttacatcagagatataccattccatataacggccctgtacgcctggacggataaagcgtttacgcgacaacggatgcccgatgcgacgctggcgcgtcttatcgggcctacaaacggccccgaatcgtaggtcggataaggcgttcacgccgcatccgacaaaccatgctggatcacaacttcgcaaacacccgacgtgcagcatcgatggtgttattgatatcttccatgctgtgcgccacggacataaagcccgcttcaaacgcactcggtgccaggtaaacaccttcgtccagcatcatatggaagaaacgcttaaagcgttccacgtcacaggccatcacatcctgatagcacgtcacggactcggcgtcggtaaagaaaataccgaacatgccgccaacgtggttaacgaccagcggaattccggcttcttctgccgcttccagcagaccttctgccagacgtgttgtcagctcatccagcgtttcgtgaacgcccggctgcgcgacttcattcagacaggcgaaacccgctgccatcgcaatcgggttaccggaaagcgtacccgcctgatagaccggacccgtcggggccagcgcatccattacatcacgacgaccaccgaatgcgcctaccggcattccaccgccgatgattttgccgaggcaggttaaatctggcactacgccgtaataatcctgtgcgccagctagcgctacgcggaaaccggtcatcacttcatcgatgatcagcaacgcgccaaattcgtcgcacagcgcgcgcagacctggcaggaactctggcagcggcggaacacagttcatattgcctgccaccggctcgacgataatacaggcaatctcttgcgggtattgctcaaatgcggcgcgtacagaagccagatcattataagtacaggttaaggtatatttggcgaaatctgccggaacgcccgggctgtttggctggcctaacgtgagtgcgccagaaccggctttcaccagcaggcagtcagcgtgaccatggtaacacccttcaaatttaataattttgtcgcgaccggtaaaaccacgggccaggcggatggcgctcatggtcgcttcagtgccggagttcaccatgcgcaccatatccatggtcgggaccagttcggtcaccagttgcgccattttcacttccatttcggttggtgcaccaaagcttaaaccacgctcggcggcttcaatcacggcattgcggattgccggatggttatggcccagcaccatcggcccccaggaaccgacataatcgatataggctttgccatcaacatcgtacagataagcgccgtccgctttttcgataaacagtggagtgccgcccacgccagtaaaggcgcgaacaggggagttcacaccgccagggatcagctcgcgcgctgcgctgtaaagattttcagacttactcatggagggttcctgattcgtagaaaaagtgaatggctgctattctatgttattcataacaagttaaatactcgtcaaacatcaggctgcttgtactggtgcaatcctgatttcttagagtataaaagttttgtgcatttgaaacattacgctttgcaaaggattttcatggaacgtgcgagtaaaatgccgtcatcttatttgtatgaccaataagtgatcattggatgaaaactgatactccctctttagaaacaccgcaggccgcgcgcctgcgacgcagacaactgattcgccaacttcttgagcgcgataaaaccccgttagccattttgtttatggcggcagtcgtcggcacgcttgttgggctggcagcggttgcttttgacaaaggtgtcgcctggttgcagaaccaacgtatgggggcgctggtacatactgctgataattatccgcttctgttaaccgtcgcttttctctgtagcgcggtgctggcgatgtttggctactttttggtgcgcaaatacgcgccggaagcaggtggtagcgggatcccggaaattgaaggggcgctggaagatcaacgtcccgttcgctggtggcgtgtattgccggtgaagttctttggcgggctggggacactcggcggaggcatggtgttggggcgcgaagggccaaccgtgcagatcggcggtaacattggccgtatggtgcttgatattttccgcctgaaaggtgacgaagctcgccatacgctgctggcaaccggtgctgctgcggggctggctgcggcctttaacgcgccgctggcgggtattttgtttattatcgaagagatgcgtccgcagtttcgctatacgttaattagcattaaagcggtatttattggtgtcattatgagcaccattatgtaccggatttttaatcatgaagttgcgttgattgacgtcggtaaactttctgatgcgccgcttaatacgctgtggctttatctgatcctcggtattatttttggcattttcggccctatttttaataaatgggtgctggggatgcaggatttgctgcaccgtgtgcacggcggcaatattaccaaatgggtgctaatgggcggtgcgattggcggtctgtgtggattgctggggtttgtggcaccagcaacgagcggcggcggttttaacctgattcctatcgctaccgcggggaatttcagcatgggaatgctggtgtttatcttcgtcgcgcgggtcattaccaccttactctgcttctcttccggcgcgccgggcggtatttttgccccgatgctggcgctgggtactgtgctgggaaccgctttcggaatggttgccgttgagctgtttccgcaatatcaccttgaggcggggacgtttgctattgccggaatgggggcattactggcggcatctattcgcgcgccgttaacggggatcattctggttctggagatgaccgataactaccagctcattttgccaatgattattaccggtcttggcgcaacactattagcgcaatttaccggcgggaaaccgctatacagcgcgattcttgcgcgcacgctggcaaaacaggaagctgagcaactggcgcgaagcaaggccgcaagtgccagcgagaatacttgaacgaaataccagggtattagataatggcgattattattgggttagaatttgcccaattgccgatgtcgtttggagcaaaatatgagtgatgacgtagcactgccgctggagtttaccgacgcagcagccaacaaagttaaaagcctgatcgctgacgaagataacccgaatctgaaattacgcgtgtatatcaccggtggcggttgcagcggcttccagtatggtttcacctttgatgatcaggtgaacgaaggcgatatgaccatcgaaaaacagggcgttggcctggtggttgatccgatgagcctgcaatatctggtcggcggttccgttgattataccgaaggtctggaaggttctcgtttcatcgtgaccaacccgaacgcgaaaagcacctgcggttgcggttcttcctttagtatctaatctgttgttcatgtgccggataaactatccggcacatcttctctcttcaacgcccattctcatccagcgcaaacgtcggtagcttaagatgccaacgaatagccgccagccgaatcaatagcgtcacgaccatgcccatcatactggctgtttccagtggtacggaaaatgtgtaataagccgtagcgtggacaataccgccgataatacaggcagttgcgtagatttctgtacgtaaaatcatggggatttcgcgggccagaacatcacgaatgatcccgccgccaacgccagtaatgacgcccatacaaaccgcgattaacggaccggcttccgcattaaaggctttattcacgccaatgccgacaaacaccgccagaccaacggcgtccagcaccggcaacatccattttggtaagcgtcttggctggcgcaccagcacgatggtcagcatgctggtgaccattgcaacgaccagatcggtgggatctttcacccaaaataccgggccgtgatccagcgccatgtcgcgaattgtcccgccgcctactgcggttaccacgcccagtaccagaacaccaaaagggtccatacgcaattttccggctaacaaaacgccggagatggcaaataccgctgtgccgactatattcagccaatagacgagcattgttcaatccccactgagcacctgaaaaggtcaggcgttaatctacctgactaagcgcattacagagctgttgtgcagcgaggataatacgtgggcttgcacgttcaaaccagtcactcgtgagaggaataacgggaattttgagctgttcaccccagtattgtttgattttaggaatttggtccggtccgcctgtaatgacaatcgcctgtgggctgcgtgctaacacctgttcgcggctaacttgcggccagggaacccggctgtctttaaagatgttttctccgccacaaacttcgagtacctggttctgaatgctctcttttccactggtaaatggcggattaatgccgaattgcagaaaaacacgttttttaggtttatcagcatattgcgctttcaattgcgcgtactgatccagcagggattgcgcggcttgttcggccttgtctggttgcggactccagggggccagttgacgtaacgcattggcaatttgttcaatgcttgtcgcatcgacccacatcacttttattcccaggctagccagctggtcaacctgccgctcggcattacctccacgccaggcaatcaccagatcgggtttcagcgcgacaatgcgttccagattcatcccctgccaggtggaaacctgctcaatcttttgcgcttgtggaggatagtcggaatagctgctgaccccaaccggcgtgatcccggcggcaaaggcaagttcagtgttggcgggagaaagcgtgatgacgcgcggcgcggcgttgagccacagtggcgcaagaaaagacagggcgaccagcgccctgaacagactcttagccatgtgcaagtttctgcaccagactctcaaccatcaggctggactgtttagcggcaacagccaggaactcatcgaagctaagataagactgttgatcggccacgtcggagatggcgcgtacgacaacaaacgggacgttgaaattgtggcagacatgggcgattgccgtcgcttccatctctacagcaatggcctgtgggaagttgtggcggattttcgccagaccaacagaaccgttgatgaaagcgtcgccgctaacaatcaggccacgtacagcgttaagattcagttcggcaatgcaggcctcagcggcagcgatcagtttatcgtcagctttaaagcctgccggacagcctggtaactgaccgtattcataaccaaatgccgtgacatccgcgtcgtgataacgtgcttcgtcgctgacaacgatatcgcccactttcaacgttggtgccaggccaccggcagaaccggtgttaataatcacatctggcttgcagtgttccaacagcaaagtggcacccagcgccgcagcgactttaccgatgccgcttttcagaagcgcaacctcggttccattcagttggccggtatagatttcgcaaccgccgagactgatagtttgacggttttcgattttgtcacgcagcagcgtaacttcttcttccattgcaccaatgatgccgattttcatagatttactcgcgataagcccgatttgaaggcatagtttaccatgcgcttacggggaagcgtatttctcacgcgggagaggacatggcacagattgatttccgaaaaaaaataaactggcatcgtcgttaccgtagtccgcagggcgttaaaaccgaacatgagatcctgcggatcttcgagagcgatcgcgggcgtatcatcaactctccggcaattcgtcgtctgcaacaaaagacccaggtttttccactggagcgcaatgccgccgtgcgcacgcgtcttacccacagcatggaagtccagcaggtggggcgctacatcgccaaagaaattttaagccgtctgaaagagcttaaattactggaagcatacggcctggatgaactgaccggtccctttgaaagcattgttgagatgagttgcctgatgcacgatatcggcaatccgccgtttggtcattttggcgaagcggcgataaatgactggtttcgccaacgtttgcacccggaagatgccgaaagccagcctctgactgacgatcgctgcagcgtggcggcactacgtttacgggacggggaagaaccgcttaacgagctgcggcgcaagattcgtcaggacttatgtcattttgaggggaatgcacaaggcattcgcctggtgcatacattgatgcggatgaatctcacctgggcacaggttggcggtattttaaaatatacccgtccggcgtggtggcgtggcgaaacgcctgagacacatcactatttaatgaaaaagccgggttattatctttctgaagaagcctatattgcccggttgcgtaaagaacttaatttggcgctttacagtcgttttccattaacgtggattatggaagctgccgacgacatctcctattgtgtggcagaccttgaagatgcggtagagaaaagaatatttaccgttgagcagctttatcatcatttgcacgaagcgtggggccagcatgagaaaggtagcctctttagcctggtggttgaaaatgcctgggaaaaaagtcgcagtaatagtttaagccgcagtacggaagatcagttttttatgtatttacgggtaaacaccctaaataaactggtaccctacgcggcacaacgatttattgataatctgcctgcgattttcgccggaacgtttaatcatgcattattggaagatgccagcgaatgcagcgatcttcttaagctatataaaaatgtcgctgtaaaacatgtgtttagccatccagatgtcgagcggcttgaattgcagggctatcgggtcattagcggattattagagatttatcgtcctttattaagcctgagcttaagtgactttactgaactggtagaaaaagaacgggtgaaacgtttccctattgaaagccgcttattccacaaactcagcacgcgccatcggctggcctatgtcgaggctgtcagtaaattaccgagtgattctcctgagtttccgctatgggaatattattaccgttgccgcctgctgcaggattatatcagcggtatgaccgacctctatgcgtgggatgaataccgacgtctgatggccgtagaacaataaccaggcttttgtaaagacgaacaataaatttttaccttttgcagaaactttagttcggaacttcaggctataaaacgaatctgaagaacacagcaattttgcgttatctgttaatcgagactgaaatacatgaaaaaaaccacattagcactgagtgcactggctctgagtttaggtttggcgttatctccgctctctgcaacggcggctgagacttctagtgcaacgacagcccagcagatgccaagccttgcaccgatgctcgaaaaggtgatgcctagtgtggtcagcattaacgtagaaggtagcacaaccgttaatacgccgcgtatgccgcgtaatttccagcagttcttcggtgatgattctccgttctgccaggaaggttctccgttccagagctctccgttctgccagggtggccagggcggtaatggtggcggccagcaacagaaattcatggcgctgggttccggcgtcatcattgatgccgataaaggctatgtcgtcaccaacaaccacgttgttgataacgcgacggtcattaaagttcaactgagcgatggccgtaagttcgacgcgaagatggttggcaaagatccgcgctctgatatcgcgctgatccaaatccagaacccgaaaaacctgaccgcaattaagatggcggattctgatgcactgcgcgtgggtgattacaccgtagcgattggtaacccgtttggtctgggcgagacggtaacttccgggattgtctctgcgctggggcgtagcggcctgaatgccgaaaactacgaaaacttcatccagaccgatgcagcgatcaaccgtggtaactccggtggtgcgctggttaacctgaacggcgaactgatcggtatcaacaccgcgatcctcgcaccggacggcggcaacatcggtatcggttttgctatcccgagtaacatggtgaaaaacctgaccagccagatggtggaatacggccaggtgaaacgcggtgagctgggtattatggggactgagctgaactccgaactggcgaaagcgatgaaagttgacgcccagcgcggtgctttcgtaagccaggttctgcctaattcctccgctgcaaaagcgggcattaaagcgggtgatgtgatcaccagtctgaacggtaagccgatcagcagctttgccgcactgcgtgctcaggtgggtactatgccggtaggcagcaaactgaccctgggcttactgcgcgacggtaagcaggttaacgtgaacctggaactgcagcagagcagccagaatcaggttgattccagctccatcttcaacggcattgaaggcgctgagatgagcaacaaaggcaaagatcagggcgtggtagtgaacaacgtgaaaacgggcactccggctgcgcagatcggcctgaagaaaggtgatgtgattattggcgcgaaccagcaggcagtgaaaaacatcgctgaactgcgtaaagttctcgacagcaaaccgtctgtgctggcactcaacattcagcgcggcgacagcaccatctacctgttaatgcagtaatctccctcaaccccttcctgaaaacgggaaggggttctccttacaatctgtgaacttcaccacaactccatacatcttcatcatcctttaggcatttgcacaatgccgtacgttacgtacttccttatgctaagccgtgcataacggaggacttatggctggctggcatcttgataccaaaatggcgcaggatatcgtggcacgtaccatgcgcatcatcgataccaatatcaacgtaatggatgcccgtgggcgaattatcggcagcggcgatcgtgagcgtattggtgaattgcacgaaggtgcattgctggtacttagtcagggacgagtcgtcgatatcgatgacgcggtagcacgtcatctgcacggtgtgcggcaggggattaatctaccgttacggctggaaggtgaaattgtcggcgtaattggcctgacaggtgaaccagagaatctgcgtaaatatggcgaactggtctgcatgacggctgaaatgatgctggaacagagccggttgatgcacttgttggcgcaggatagccgtttgcgggaagaactggtgatgaacctgattcaggcagaggagaatactcccgcacttactgaatgggcgcaacggctggggatcgatctcaatcaaccgcgagtggtggctattgttgaggtcgacagcggtcagcttggcgtggacagcgcaatggcggagttacaacaactgcaaaacgcgctgactacgcccgagcgtaataatctggtggcgattgtcagcctaaccgaaatggtggtgttgaaaccggcgttgaactcttttgggcgctgggatgcagaagatcatcgtaagcgagttgaacaactgattacccgcatgaaagagtacggccagctgcgttttcgcgttagtctgggcaactattttaccggtcctggcagtattgcccgatcctatcgtacggcgaaaacgacgatggtggtgggtaaacagcggatgccagaaagtcgctgctatttttatcaggatctgatgttacctgtgttactcgacagtttgcgtggcgactggcaggccaacgaactggcgcgaccgctggcgcggctgaaaacgatggacaataacggcttgctgcgacgaacgctggcggcgtggtttcgccacaatgtgcaaccgctggcaacgagtaaggcgttgtttattcatcgtaataccctggagtatcggcttaatcgtataagcgaactgaccgggcttgatttgggcaattttgatgacaggttgctgctgtatgtggcgttacaactggatgaagagcggtaagttatgcgttaaggttgaggcggcgctggctcattcccctcagcccgaagggtagaggggaatgcccgaattaaccgtcagttcgggattatttacgcgttagtttttccagatcggcttcaatctcgctgatcttattggttacgacactctccaggtgacgtaagtcgtcgaggatcttacgcttaagatcaacttcgctgcggtcacgctggcagatttgatcaagctcatcaatgatataccgtagattcgggctgatttcctggacttctttataaccctgacccacaccatcagcgacgaccgttttacgctgacgcggatatttaaacttaacgctcttggcgaaaaactcgcctttgtctttctggaaatagattttcagaatatcgttgttggcttcctgccggaggctgtaacgatcaatttcttcaggattggtaatacccagacttttcagattgtcgtacatagcgttacctcaaaatgagtcagtaaattgtgcttattttagcatttggcctggcccgcccggctcgactgtgatcgcagaaagcctttttcttccagacttctatcatggcgtaaaaatcaaaaaattacctgctttattctggtgataaaattcacgatttacaccagttccagcatcgttacttccgggcggcagttcagacgcaaaccatacaaactgcccacgccacgggttgtgtagatgtgtctttcgccaaaggcatttaatccggcgacgtaacgtttatcttcgacaggggcaaaaggttcaccaaccaacggtacgcgcagttgcccgccgtgagtatggccgcacagcatcagatcccagggttcatcacgcatgacttctttgctgtcgggattatgcgccagcaccagtcttggcagattggcttcgctggcgggaggcggtttgcattgtccggcccataagtcaccagtgcctaccagttcgaattgcctgttcggcgtggcgatcaccgtagcctggttaaacaacaccgtgatgcccgcacttttcaacgtctcgccaattaagtgatttttttctgtaccaacagggcgatcgtggttgccgaagcaggcaaacgtcggcgcacattcggcaaggggggagagtacgtcactaaacgcgctaaaattcaggctcatatcaaataatacgtaatcgccgcccagtaatatcaaatcgggcttttgttctatgccaagagcaatcgcgtcagaaatcaggcttaaaggaacaaaacgagagtaatggagatcggccagaaaaagaattttgaatggtgctgcgttgtctttaaaaaaggcgaggcggtgacggattaattcaaaccagcctggctcacagtaatgcatataaccgaaaccactgctcgtggctatcgtcgcggcagtagcctgcaaaaatcggcggcgactaatcatcgctcatccctgcaaaaaaatcgggcagcgtcgtgctgcccgtgtgcatacttttagtcgatggtacgcagcagttcgttaatgccgactttgccgcgagttttcgcgtcaactttcttaacgataaccgcacagtagaggctgtatttgccatctttactcggcagattaccactaacaaccacagaccccgccggaacgcgaccgtagtggatttcgccggtttcacggtcgtaaatacgggtgctctgaccaatgtatacgcccatggaaatgacggaaccttcttcgacaatcaccccttcaaccacttcagagcgcgcgccgatgaagcaattatcttcaatgatggttgggttagcctgcagcggttccagcacgccgccgatgcccacgccaccggaaaggtggacgtttttaccaatctgcgcacaagaaccgacggtcgcccaggtatcaaccatggtgccttcatcaacatatgcgccgatgttgacgtaagacggcatcagcacggtgttacgggcaataaacgcaccctgacgtaccgccgctggtggcacaacgcggaagccttctttctggaaacgtgcttcgtcgtagtcggcgaatttcatcggcactttgtcgaagtagcggctttctgccccttcgatcacctgattatcattaatacggaaagagagcagcaccgcttttttcaaccactgatgcgtcacccactgaccgtcaattttttccgctacacgcagtgcgccggaatccagcagggcgatcacctgatttaccgcttcgcgggtaacggtgtctgcattggctggcgtgatctcggcacggcgttcaaaagcggtttcaataatgttctgtaactgctgcattgttaaactcttttcatatcagtaaacacatcaccctttatcgtttggattgagggcctctgtcaaccgctgatgcacttcctgctgcaactcgttattaagcgcacgccggtcagcggtggcaattatgaataaatcttctactcgctcgccaatggttgtaattcgggcaccatgaaggctaattcccagatcggcaaaaattttcccgactcgcgccagcagtccaggttggtcgagggcgatcagttcgaggaagcttttgcggtcggtatgggtcggcaaaaacgttacttcggtttcaacagtaaaatggcgtaatttggcgggttggcgacggggctgcggtggctgccagctactttgcgtcagtacttgctccagaccaaaccgaataacctcatgacgatctgcggacagcgggttgccatcgggttccagcacgataaaggtatccatcgccataccgtcgcgagtggtgaaaatttgtgcgtcgtgaacacttaaattgcggcggtctaattcggcacagacggcggcaaacagataagggcggtccgggctccagataaaaatctcggtgcctccacgcgtagcctgcgggctaagcaataccagcggtttgcttaaatcatgctgtaataaatggcgggcatgccaggccagttgatttgggctatggcggacaaaatagttagcacgacagcgactccaaatttggtgcagcgcctcttcgtcgatgttatccatgcgcagtagtgccagtgcctggagttggtgatggcgaacccgttcgcgcatatccggcgtgttttgcattccgcgtcgtagctgcttttcggtggcaaagtagagctcacgcaacagactttgcttccagctattccacagcgtttcgttggtggcgcaaatgtcagccacagtcaggcataccagatagcgcagacgattttccgtttgcacttcttcggcaaactgcttgatgacttccgggtcctgaatatcgcggcgttgggcggtcacgctcatcaacaggtgctggcgaaccagccaggcgaccagctgtgtttcgcgactgttcagcccgtggagttcggcaaaatgcactacatcctgagcaccgagaatggagtggtcgccgccgcgtcctttggcgatatcgtgaaacagcgcggcgatgaaaatcagctcagtactcggcaggcgcggccagacgtccacacacaacggatggcgctggcgcgtttcttcactggcaaaactctccagtttcagcatcacgcggatagtatgttcatccaccgtgtaggcgtggaacagatcaaactgcatctgcccgacgatatggctccattgcggcatatacgcgccgagcacgctatggcgatgcattggcaatagcccgcgccgcaccgctccggggtgacgcagaatgctcaaaaacagttttcgtgcttccggaatattacacagcggttgttgcagatggcgacgggcatggcgtaactggcgcagcgtggtggagtaaatgccggtgatcgcactgttgtgcaccatggtgtagaacatacgcaagatggcttccggctggcgcataaatagtgtttcatcacgcaggtcgattagcgtaccgcgtagctgaaactcatcgtcgattggacgtggtttttcgtcggcgggaagggcgaggatggcttcatcgaacagttgcagcagcatctggttgagttcactgacgcggcgtgtaacgcggaagtaatccttcatcatccgctcgaccggttcgttaccttcaccactgtaattcagacgctgggcgacgctaagctggcgatcgaataacaggcgattatcgtaacggctgacgaccagatgcagggcaaagcgaatacgccacaatatatgcagacattcgtttaattccgcccgctccgcactggttaagaagccaaacccgaccatttcatccaggcttgttgcgccaaaatgacggcgggccacccattgcagagtgtggatatcgcgcaagccgccagggctgcttttgatgtctggttcaaggttgtagctggtgccatggtaacgctgatggcgctggttctgttcttcaactttcgccgcgtagaacttgtcggaaggccagaatccttcgctgaaaatatgtttttgcagttcgaggaacagcgcaacatcgccaattaataagcgggattcgattaaattggtggcgacggttaaatcgcttaacccttccagcatgcactcttcaagcgtgcgcacgctatgaccgacttccagctttacatcccagagcagcgttaacagctcgcccactttttgcgcctgatcgtccgggagctttttacggcttaaaatcagtaaatcgacgtcactaagtggatgcagctcgccacgaccgtagccaccgacggcgaccaatgccaggtcggcaatctggctgaatcccgcttcaatccataatcgttgcaggagctggtcgataaactcggtgcgcgcctcaatcaactgttctgcagagatcccattgtcaaaggcatcacccagccaacgctggaaagtatcgatatgggcttttatcccaccgacggttaattcatcacggggccagacgcatggattttgcggttgaccgggcagggtggggagagcggtgtttgcgtactgttctggaagggtattcattgtgcgccacccataagattaaattatcgcattaaaaaagccggcattcgccggcttcatcttattcgtcgtggctgattatcgccgggatggtgtcatccttgcgtagcgtcagaatttcgcagccgttatcagtcaccacaatagtatgctcatattgtgcagacaagctgcgatctttggtttttaccgtccagccatctttcatggtgcggatctcttttttacccgcgttgaccattggctcgatggtgaacgtcatcccaggtttcagtacgacgttggtttcacgggagtcatagtgcagcacctgcggttcttcatggaagccgcgaccaataccgtgtccgcaatattcacgaacgacggagaagccttctgcttcgacaaatttctgaatcgccgcaccgatttcgcgcagattaatgcctggttttaccatgcgtagcgccaggtacaggctttcttgcgtgatgcggcacagacgttcgcccatgatggtcggcttaccgacgataaacattttgctggtatcgccgtggaaaccatctttgattacggtgacatcaatgttaacgatatcgccatctttcagcagcttagcatcgtccgggataccgtggcacaccacttcattaatagagatgcaaacggatttcggatagccgtgatagccgaggcaggcagaaaccgcgtgttgttcattaacaatgtaatcattacagatgcgatccagctcgccggtgctgacgcccggtttaacatacggttcgatcatctccagcacttcggcagccagtcggccagcgacgcgcattttttcgatatcttctggggtcttgatagagatagccattaattctgtccatcagcgtcggtgataccgacaatatatatgtaagtgccgtcaatggtatcacacccgggcaaattgagaatcattctgaatttcgccaaacgtgccactgaaggttttctataatagaaaattcgacgtctgatgctgtacacagcgccaacaattattggtgtccacgacgtatttgtggtataaagcgcgccggacttccgatccatttcgtatacacagactggacggaagcgacaatctcactttgtgtaacaacacacacgtatcggcacatattccggggtgccctttggggtcggtaatatgggatacgtggaggcataaccccaacttttatatagaggttttaatcatggcaactgtttccatgcgcgacatgctcaaggctggtgttcacttcggtcaccagacccgttactggaacccgaaaatgaagccgttcatcttcggtgcgcgtaacaaagttcacatcatcaaccttgagaaaactgtaccgatgttcaacgaagctctggctgaactgaacaagattgcttctcgcaaaggtaaaatccttttcgttggtactaaacgcgctgcaagcgaagcggtgaaagacgctgctctgagctgcgaccagttcttcgtgaaccatcgctggctgggcggtatgctgactaactggaaaaccgttcgtcagtccatcaaacgtctgaaagacctggaaactcagtctcaggacggtactttcgacaagctgaccaagaaagaagcgctgatgcgcactcgtgagctggagaaactggaaaacagcctgggcggtatcaaagacatgggcggtctgccggacgctctgtttgtaatcgatgctgaccacgaacacattgctatcaaagaagcaaacaacctgggtattccggtatttgctatcgttgataccaactctgatccggacggtgttgacttcgttatcccgggtaacgacgacgcaatccgtgctgtgaccctgtacctgggcgctgttgctgcaaccgtacgtgaaggccgttctcaggatctggcttcccaggcggaagaaagcttcgtagaagctgagtaataaggcttgataactcccccaaaatagttcgagttgcagaaaggcggcaagctcgagaattcccgggagcttacatcagtaagtgaccgggatgagcgagcgaagataacgcatctgcggcgcgaaatatgaagggggagagcccttatagaccaggtagtacacgtttggttagggggcctgcatatggccccctttttcacttttatatctgtgcggtttaatgccgggcagatcacatctccgaggattttagaatggctgaaattaccgcatccctggtaaaagagctgcgtgagcgtactggcgcaggcatgatggattgcaaaaaagcactgactgaagctaacggcgacatcgagctggcaatcgaaaacatgcgtaagtccggtgctattaaagcagcgaaaaaagcaggcaacgttgctgctgacggcgtgatcaaaaccaaaatcgacggcaactacggcatcattctggaagttaactgccagactgacttcgttgcaaaagacgctggtttccaggcgttcgcagacaaagttctggacgcagctgttgctggcaaaatcactgacgttgaagttctgaaagcacagttcgaagaagaacgtgttgcgctggtagcgaaaattggtgaaaacatcaacattcgccgcgttgctgcgctggaaggcgacgttctgggttcttatcagcacggtgcgcgtatcggcgttctggttgctgctaaaggcgctgacgaagagctggttaaacacatcgctatgcacgttgctgcaagcaagccagaattcatcaaaccggaagacgtatccgctgaagtggtagaaaaagaataccaggtacagctggatatcgcgatgcagtctggtaagccgaaagaaatcgcagagaaaatggttgaaggccgcatgaagaaattcaccggcgaagtttctctgaccggtcagccgttcgttatggaaccaagcaaaactgttggtcagctgctgaaagagcataacgctgaagtgactggcttcatccgcttcgaagtgggtgaaggcatcgagaaagttgagactgactttgcagcagaagttgctgcgatgtccaagcagtcttaattatcaaaaaggagccgcctgagggcggcttctttttgtgcccatcttgtaaattcagctaacccttgtggggctgcgctgaaaagcgacgtacaatgtcgctagtattaattcatttcaatcgttgacagtctcaggaaagaaacatggctaccaatgcaaaacccgtctataaacgcattctgcttaagttgagtggcgaagctctgcagggcactgaaggcttcggtattgatgcaagcatactggatcgtatggctcaggaaatcaaagaactggttgaactgggtattcaggttggtgtggtgattggtgggggtaacctgttccgtggcgctggtctggcgaaagcgggtatgaaccgcgttgtgggcgaccacatggggatgctggcgaccgtaatgaacggcctggcaatgcgtgatgcactgcaccgcgcctatgtgaacgctcgtctgatgtccgctattccattgaatggcgtgtgcgacagctacagctgggcagaagctatcagcctgttgcgcaacaaccgtgtggtgatcctctccgccggtacaggtaacccgttctttaccaccgacagtgcagcttgcctgcgtggtatcgaaattgaagccgatgtggtgctgaaagcaaccaaagttgacggcgtgtttaccgctgatccggcgaaagatccaaccgcaaccatgtacgagcaactgacttacagcgaagtgctggaaaaagagctgaaagtcatggacctggcggccttcacgctggctcgtgaccataaattaccgattcgtgttttcaatatgaacaaaccgggtgcgctgcgccgtgtggtaatgggtgaaaaagaagggactttaatcacggaataattcccgtgatggataaataagggtaagattccgcgtaagtatcgcgggggcgtaagtctggttataaggcgttattgttgcaggcagtttggtcacggccagcgcgcagcaaccggagcgtacaaaagtacgtgaggatggcgagcactgcccggggccaaaatggcaaataaaatagcctaataatccagacgattacccgtaatatgtttaatcagggctatacttagcacacttccactgtgtgtgactgtctggtctgactgagacaagttttcaaggattcgtaacgtgattagcgatatcagaaaagatgctgaagtacgcatggacaaatgcgtagaagcgttcaaaacccaaatcagcaaaatacgcacgggtcgtgcttctcccagcctgctggatggcattgtcgtggaatattacggcacgccgacgccgctgcgtcagctggcaagcgtaacggtagaagattcccgtacactgaaaatcaacgtgtttgatcgtagtatgtctccggccgttgaaaaagcgattatgacgtccgatcttggcctgaacccgaactctgcgggtagcgacatccgtgttccgctgccgccgctgacggaagaacgtcgtaaagatctgaccaaaatcgttcgtggtgaagcagaacaagcgcgtgttgcagtacgtaacgtgcgtcgtgacgcgaacgacaaagtgaaagcactgttgaaagataaagagatcagcgaagacgacgatcgccgttctcaggacgatgtacagaaactgactgatgctgcaatcaagaaaattgaagcggcgctggcagacaaagaagcagaactgatgcagttctgatttcttgaacgacaaaaacgccgctcagtagatccttgcggatcggctggcggcgttttgctttttattctgtctcaactctggatgtttcatgaagcaactcaccattctgggcagcaccggcagcattggttgcagcacgctggacgtggtgcgccataatcccgaacacttccgcgtagttgcgctggtggcaggcaaaaatgtcactcgcatggtagaacagtgcctggaattctctccccgctatgccgtaatggacgatgaagcgagtgcgaaacttcttaaaacgatgctacagcaacagggtagccgcaccgaagtcttaagtgggcaacaagccgcttgcgatatggcagcgcttgaggatgttgatcaggtgatggcagccattgttggcgctgctgggctgttacctacgcttgctgcgatccgcgcgggtaaaaccattttgctggccaataaagaaagtctggttacctgcggacgtctgtttatggacgccgtaaagcagagcaaagcgcaattgttaccggtcgatagcgaacataacgccatttttcagagtttaccgcaacctatccagcataatctgggatacgctgaccttgagcaaaatggcgtggtgtccattttacttaccgggtctggtggccctttccgtgagacgccattgcgcgatttggcaacaatgacgccggatcaagcctgccgtcatccgaactggagcatggggcgtaaaatttctgtcgatagcgctaccatgatgaacaaaggtctggaatacattgaagcgcgttggctgtttaacgccagcgccagccagatggaagtgctgattcacccgcagagtgtgattcacagtatggtgcgctatcaggacggcagtgttctggcgcagctgggggaaccggatatgcgtacgccaattgcccacaccatggcatggccgaatcgcgtgaactctggcgtgaagccgctcgatttttgcaaactaagtgcgttgacatttgccgcaccggattatgatcgttatccatgcctgaaactggcgatggaggcgttcgaacaaggccaggcagcgacgacagcattgaatgccgcaaacgaaatcaccgttgctgcttttcttgcgcaacaaatccgctttacggatatcgctgcgttgaatttatccgtactggaaaaaatggatatgcgcgaaccacaatgtgtggacgatgtgttatctgttgatgcgaacgcgcgtgaagtcgccagaaaagaggtgatgcgtctcgcaagctgaggataatccggctacagagagtcgcgctatttgttagcgtagggcttcagtgatatagtctgcgccatctgatcgtaagtagttggctttataaggtcagatatgccgtggttttacacggcttttttttgtataggcttcagtattcctgagtaccgtaaaccctgtcagggaataaaaaacgcgtgatgttgtctgctactcaaccacttagcgaaaaattgccagcgcatggctgccgtcatgttgcgatcattatggacggcaatggccgctgggcaaaaaagcaagggaagattcgtgcctttgggcataaagccggggcaaaatccgtccgccgggctgtctcttttgcggccaacaacggtattgaggcgttaacgctgtatgcctttagtagtgaaaactggaaccgaccagcgcaggaagtcagtgcgttaatggaactgtttgtgtgggcgctcgatagcgaagtaaaaagtctgcaccgacataacgtgcgtctgcgtattattggcgataccagtcgctttaacagccgtttgcaagaacgtattcgtaaatctgaagcgctaacagccgggaataccggtctgacgctgaatattgcggcgaactacggtggacgttgggatatagtccagggagtcaggcaactggctgaaaaggtgcagcaaggaaacctgcaaccagatcagatagatgaagagatgctaaaccagcatgtctgtatgcatgaactggcccctgtagatttagtaattaggactgggggggagcatcgcattagtaactttttgctttggcaaattgcctatgccgaactttactttacagatgttctctggcccgatttcgatgaacaagactttgaaggggcgttaaatgcctttgctaatcgagagcgtcgtttcggcggcaccgagcccggtgatgaaacagcctgatgggggtcgcttttgctgaagtatcgcctgatatctgcttttgtgttaatacccgtcgtcatcgcggcgttgtttctgttgccgccggtggggttcgccattgtaacgctggtggtctgcatgctggcagcgtgggaatggggacagcttagcggttttaccactcgtagccagcgagtatggttggcggtgttatgcgggttattgttggcgctgatgctttttctgttgccggaatatcaccgaaatattcatcaaccgctggttgaaatcagtctttgggctagcctgggttggtggattgtcgcgctattgctggtgctgttttacccaggttccgcagcaatctggcgtaactctaaaacattgcgccttatttttggcgtgctaaccattgttcccttcttctggggcatgctggcgttacgggcctggcactatgacgagaatcattacagtggcgcaatatggttgctctatgtcatgatcctggtatggggcgctgactccggcgcatatatgtttggcaaattgtttggtaaacataagctggcaccgaaggtttctccgggtaaaacctggcaaggctttatcggtggactcgctactgcagcggtaatcagttggggttatggcatgtgggcgaatctcgacgtcgctcccgtcaccttactcatttgctctattgtcgcagcgttagccagtgtgctcggcgatctgaccgagagtatgtttaagcgtgaagcaggaattaaggacagcggtcatttaattccaggacacggtggtattttagatcgtattgatagcctgacggctgcggtaccggtctttgcttgcttgttgttactggtattcaggacgctttaacggaaggtaatatgctgagttttctctgggatttggctagcttcatcgttgcactgggtgtacttatcaccgtgcatgaatttggtcatttctgggttgcccggcgttgtggtgttcgcgttgagcgtttcagtatagggtttggtaaggcgctctggcggcgaactgataagctcggcaccgaatatgttatcgccctgatcccgttgggcggttatgtcaaaatgctggatgagcgcgcagaaccggtcgttccggaactccgccaccatgccttcaataataaatctgtcggccaacgagcggcgattattgccgcaggtccggttgcaaacttcatttttgctatctttgcctactggctggtttttattattggtgtgcctggcgtacgtccggtggttggcgaaatagcagccaatagcatagctgcggaagcacaaattgcaccaggtacggaactaaaagccgtagatggtatcgaaacgcctgattgggatgccgtgcgtttgcagttggtcgataaaattggcgatgaaagcaccaccattacagtagcgccatttggcagcgaccaacggcgggatgtaaagctcgatttacgtcactgggcgtttgagcctgataaagaagatccggtatctagcctggggattcgtcctcgtgggccgcaaattgaacctgtactggaaaatgtgcagccaaacagcgcggcaagcaaggcaggtttgcaagcaggcgacaggatcgttaaagtcgatggtcagcccttaacgcagtgggtgacctttgtgatgcttgtccgggataacccgggtaaatccttagcgttagaaatcgaaaggcaggggagtcccttgtctttgacattaatcccggagagtaaaccgggtaatggtaaagcgattggttttgtcggtattgagccgaaagtcattcctttgccagatgagtataaagttgtacgccagtatgggccgttcaacgccatcgtcgaagccacggacaaaacgtggcagctgatgaagctgacggtcagtatgctgggaaaattgatcaccggtgatgtgaaactgaacaacctcagtgggccgatctctatcgccaagggggctgggatgacagcggaactcggggttgtttattacctgccgtttcttgcgcttattagcgtgaacttagggataattaacctgtttccgttgcccgtacttgacggggggcatctgctgttccttgcgatcgaaaagatcaagggcggaccggtatccgagcgggttcaagacttttgttatcgcattggcagcattctgctggtgctgttaatggggcttgcacttttcaatgatttctctcggttatgagagttagttaggaagaacgcataataacgatggcgatgaaaaagttgctcatagcgagcctgctgtttagcagcgccaccgtatacggtgctgaagggttcgtagtgaaagatattcatttcgaaggccttcagcgtgtcgccgttggtgcggccctcctcagtatgccggtgcgcacaggcgacacggttaatgatgaagatatcagtaataccattcgcgctctgtttgctaccggcaactttgaggatgttcgcgtccttcgtgatggtgatacccttctggttcaggtaaaagaacgtccgaccattgccagcattactttctccggtaacaaaagcgtgaaagatgacatgctgaagcaaaacctcgaggcttctggtgtgcgtgtgggcgaatccctcgatcgcaccaccattgccgatatcgagaaaggtctggaagacttctactacagcgtcggtaaatatagcgccagcgtaaaagctgtcgtgaccccgctgccgcgcaaccgtgttgacctaaaactggtgttccaggaaggtgtgagtgctgaaatccagcaaattaacattgttggtaaccatgctttcaccaccgacgaactgatctctcatttccaactgcgtgacgaagtgccgtggtggaacgtggtaggcgatcgtaaataccagaaacagaaactggcgggcgaccttgaaaccctgcgcagctactatctggatcgcggttatgcccgtttcaacatcgactctacccaggtcagtctgacgccagataaaaaaggtatttacgtcacggtgaacatcaccgaaggcgatcagtacaagctttctggcgttgaagtgagcggcaaccttgccgggcactccgctgaaattgagcagctgactaagatcgagccgggtgagctgtataacggcaccaaagtgaccaagatggaagatgacatcaaaaagcttctcggtcgctatggttatgcctatccgcgcgtacagagcatgcccgaaattaacgatgccgacaaaaccgttaaattacgtgtgaacgttgatgcgggtaaccgtttctacgtgcgtaagatccgttttgaaggtaacgataccagcaaagatgccgtcctgcgtcgcgaaatgcgtcagatggaaggtgcatggctggggagcgatctggtcgatcagggtaaggagcgtctgaatcgtctgggcttctttgaaactgtcgataccgatacccaacgtgttccgggtagcccggaccaggttgatgtcgtctacaaggtaaaagagcgcaacaccggtagcttcaactttggtattggttacggtactgaaagtggcgtgagcttccaggctggtgtgcagcaggataactggttaggtacaggttatgctgttggtatcaacgggaccaaaaacgattaccagacctatgctgaactgagcgtaaccaacccgtacttcaccgtagatggcgtaagcctcggtggtcgtctcttctataatgacttccaggcagatgacgccgacctgtccgactataccaacaagagttatggtacagacgtgacgttgggcttcccgattaacgaatataacagcctgcgtgcaggtctgggttatgtacataactccctgtccaacatgcagcctcaggttgcgatgtggcgttatctgtactctatgggtgaacatccgagcacctctgatcaggataacagcttcaaaacggacgacttcacgttcaactatggttggacctataacaagcttgaccgtggttacttcccgacagatggtagtcgtgtcaacctgaccggtaaagtgaccattcctggaagcgataacgaatactacaaagtgacgttagacacggcgacttatgtgccgatcgatgacgatcacaaatgggttgttctggggcgtacccgctggggttatggtgatggtttaggcggcaaagagatgccgttctacgagaacttctatgccggtggttccagcaccgtgcgtggcttccagtccaataccattggtccgaaagcagtttacttcccgcatcaggccagtaattatgatccggactatgattacgaatgtgcgactcaggacggcgcgaaagacctgtgtaaaagcgatgatgctgtaggcggtaacgccatggcggttgccagcctcgagttcatcaccccgacgccgtttattagcgataagtatgctaacagcgttcgtacttccttcttctgggatatgggtaccgtttgggatacaaactgggattccagccaatattctggatatccggactatagtgatccaagcaatatccgtatgtctgcgggtatcgcattacaatggatgtccccattggggccgttggtgttctcctacgcccagccgttcaaaaagtacgatggagacaaggcagaacagttccagtttaacatcggtaaaacctggtaagtgttctccacaaaggaatgtagtggtagtgtagcgatgactttaggcgatcaatataagatcgccgggccacgcaaagaactgcaccctccggtgcaaatgggatggtaaggagtttattgtgaaaaagtggttattagctgcaggtctcggtttagcactggcaacttctgctcaggcggctgacaaaattgcaatcgtcaacatgggcagcctgttccagcaggtagcgcagaaaaccggtgtttctaacacgctggaaaatgagttcaaaggccgtgccagcgaactgcagcgtatggaaaccgatctgcaggctaaaatgaaaaagctgcagtccatgaaagcgggcagcgatcgcactaagctggaaaaagacgtgatggctcagcgccagacttttgctcagaaagcgcaggcttttgagcaggatcgcgcacgtcgttccaacgaagaacgcggcaaactggttactcgtatccagactgctgtgaaatccgttgccaacagccaggatatcgatctggttgttgatgcaaacgccgttgcttacaacagcagcgatgtaaaagacatcactgccgacgtactgaaacaggttaaataagtaatgcctagtattcgactggctgatttagcgcagcagttggatgcagaactacacggtgatggcgatatcgtcatcaccggcgttgcgtccatgcaatctgcacaaacaggtcacattacgttcatggttaacccaaaataccgtgagcatttaggcttgtgccaggcgtccgcggttgtcatgacccaggacgatcttcctttcgcgaaaagtgccgcactggtagtgaagaatccctacctgacttacgcgcgcatggcgcaaattttagataccacgccgcagcccgcgcagaacattgcacccagtgcggtgatcgacgcgacggcgaagctgggtaacaacgtaagcattggcgctaacgcggtgattgagtccggcgttgaactgggcgataacgtgattatcggtgccggttgcttcgtaggtaaaaacagcaaaatcggtgcaggtagccgtctctgggcgaacgtaaccatttaccatgagatccagatcggtcagaattgcctgatccagtccggaacagtggtaggcgcagacggctttggttatgccaacgatcgtggtaactgggtgaagatcccacagattggtcgcgtaattattggcgatcgcgtggagatcggtgcctgcacaaccatcgatcgcggcgcgctggatgacactattattggcaatggcgtgatcattgataaccagtgccagattgcacataacgtcgtgattggcgacaatacggcggttgccggtggcgtcattatggcgggcagcctgaaaattggtcgttactgcatgatcggcggagccagcgtaatcaacgggcatatggaaatatgcgacaaagtgacggttacgggcatgggtatggtgatgcgtcccatcactgaaccaggcgtctattccagtggcattccgctgcaacccaacaaagtctggcgcaaaaccgctgcactggtgatgaacattgatgacatgagcaagcgtctgaaaagccttgagcgcaaggttaatcaacaagactaacgttccatcttttgttcgccaaactttacggcctgtctcattcttacgattgcggcaggccgtgttattattgtcgtttcttatattttgacaggaagagtatcttgactactaacactcatactctgcagattgaagagattttagaacttctgccgcaccgtttcccgttcttactggtggatcgcgtgctggattttgaagaaggtcgttttctgcgcgcagtaaaaaatgtctctgtcaatgagccattcttccagggccatttccctggaaagccgattttcccgggtgtgctgattctggaagcaatggcacaggcaacaggtattctggcgtttaaaagcgtaggaaaactggaaccgggtgagctgtactacttcgctggtattgacgaagcgcgcttcaagcgcccggtcgtgcctggcgatcaaatgatcatggaagtcactttcgaaaaaacgcgccgcggcctgacccgttttaaaggggttgctctggtcgatggtaaagtagtttgcgaagcaacgatgatgtgtgctcgtagccgggaggcctgatacgtgattgataaatccgcctttgtgcatccaaccgccattgtggaagagggcgcgagtattggcgcgaacgcacacattggtcctttttgtatcgttggaccccatgtcgaaattggtgagggtaccgtactgaaatctcacgttgtcgtgaatggtcatactaaaattggccgcgataatgagatttatcagttcgcctccatcggcgaagttaaccaggatctgaaatatgctggcgaaccgacccgtgtggaaatcggcgatcgtaaccgcattcgcgaaagcgtcaccattcatcgtggcacagtccagggcggtggattgacgaaggtgggcagcgacaacttactgatgatcaacgcgcacattgcgcacgattgtacggtaggtaaccgctgtattctcgccaacaacgcaacgctggcgggtcacgtaagcgttgacgacttcgcgatcatcggcggcatgaccgcagtccatcagttctgcatcattggtgcgcacgtgatggttggcggctgctccggtgtggcgcaggacgtccctccttatgtcattgcgcagggtaaccacgcaacgccgttcggtgtcaatatcgaagggctgaagcgccgcggattcagccgtgaggcgattaccgctatccgcaatgcgtataagctgatttatcgtagcggtaaaacgctcgatgaagtgaaaccggaaattgctgaactggcggaaacatatccggaagtgaaagcctttaccgatttctttgcacgcagtacgcgcggtctgattcgttaatgactgaacagcgtccattaacgattgccctggtcgccggagaaacctccggcgatatcctgggggccggtttaatccgcgctctgaaagaacatgtgcccaacgcccgctttgttggtgttgccgggccacgaatgcaggctgaaggctgcgaagcctggtacgaaatggaagaactggcggtgatgggcattgttgaagtgctcggtcgtctgcgtcgcttactgcatattcgtgccgatctgacaaagcgttttggcgaactgaagccagatgtttttgttggtattgatgcgcctgacttcaatattactcttgaaggtaacctcaaaaagcagggtatcaaaaccattcattacgtcagtccgagtgtctgggcgtggcgacagaaacgtgttttcaaaataggcagagccaccgatctggtgctcgcatttctgcctttcgaaaaagcgttttatgacaaatacaacgtaccgtgccgctttatcggtcataccatggctgatgccatgccattagatccagataaaaatgccgcccgtgatgtgctggggatccctcacgatgcccactgcctggcgttgctaccggggagccgtggtgcagaagttgaaatgcttagtgccgatttcctgaaaacggcccagcttttgcgccagacatatccggatctcgaaatcgtggtgccactggtgaatgccaaacgccgcgagcagtttgaacgcatcaaagctgaagtcgcgccagaccttagtgttcatttgctggatgggatgggccgtgaggcgatggtcgccagcgatgcggcgctactggcgagcggtacggcagccctggagtgtatgctggcgaaatgcccgatggtggtgggatatcgcatgaagccttttaccttctggttggcgaagcggctggtgaaaactgattatgtcagcctgccaaatctgctggcgggcagagagttagtcaaagaattattgcaggaagagtgtgagccgcaaaaactggctgcggcgctgttaccgctgttggcgaacgggaaaaccagccacgcgatgcacgataccttccgtgaactgcatcagcagatccgctgcaatgccgatgagcaggcggcacaagccgttctggagttagcacaatgatcgaatttgtttatccgcacacgcagctggttgcgggtgtggatgaagtcggacgcgggccgttagttggcgcggtcgtcaccgctgcggtgatccttgacccggcgcgcccgattgccgggctgaatgattccaaaaagctgagcgaaaaacgccgtctggcgctctatgaagagatcaaagagaaagcgttgagctggagtctgggccgcgcggaaccccacgaaatcgacgagctgaacattcttcatgcgaccatgctggcgatgcagcgtgccgtcgctgggctgcatattgcgccggaatatgtgttgattgatggtaaccgctgcccgaaattaccgatgcctgcgatggctgtggtgaaaggcgatagccgcgtaccggaaatcagtgccgcgtctatcctggcgaaagtgacgcgtgacgccgaaatggcggcgctggatattgttttcccgcaatatggttttgcccaacacaaagggtacccaaccgcttttcatctggaaaaactggctgaacacggcgcgaccgaacaccatcggcgcagctttgggcctgtcaaacgcgcactgggacttgcgtcctgattcttgtgtcgagattaagtaaaccggaatctgaagatgtctgaaccacgtttcgtacacctgcgggtgcacagcgactacagcatgatcgatggcctggccaaaaccgcaccgttggtaaaaaaggcggcggcgttgggtatgccagcactggcgatcaccgatttcaccaacctttgtggtctggtgaagttctacggagcgggacatggcgcagggattaagcctatcgtcggggcagattttaacgtccagtgcgacctgctgggtgatgagttaacccacctgacggtactggcggcgaacaataccggctatcagaatctgacgttgctgatcagtaaagcgtatcagcgcgggtacggtgccgccgggccgatcatcgatcgcgactggcttatcgaattaaacgaagggttgatccttctttccggcggacgcatgggcgacgtcggacgcagtcttttgcgtggtaacagcgcgctggtagatgagtgtgtcgcgttttatgaagaacacttcccggatcgctattttctcgagctgatccgcaccggcaggccggatgaagaaagctatctgcacgcggcggtggaactggcggaagcgcgcggtttgcccgtcgtggcgaccaacgacgtgcgctttatcgacagcagcgactttgacgcacacgaaatccgcgtcgcgatccacgacggctttaccctcgacgatcctaaacgcccgcgtaactatagcccgcagcaatatatgcgtagcgaagaggagatgtgtgagctgtttgccgacatccccgaagcccttgccaacaccgttgagatcgccaaacgctgtaacgtaaccgtgcgtcttggtgaatacttcctgccgcagttcccgaccggggacatgagcaccgaagattatctggtcaagcgtgcaaaagagggcctggaagagcgtctggcctttttattccctgatgaggaagaacgtcttaagcgccgcccggaatatgacgaacgtctggagactgaacttcaggttatcaaccagatgggcttcccgggctacttcctcatcgttatggaatttatccagtggagcaaagataacggcgtaccggtagggccaggccgtggctccggtgcgggtagtctggtggcctacgcgctgaaaatcaccgacctcgatccgctggaatttgacctgctgttcgaacgtttccttaacccggaacgtgtctccatgcctgacttcgacgttgacttctgtatggagaaacgcgatcaggttatcgagcacgtagcggacatgtacggtcgtgatgcggtaagccagatcatcaccttcggtacaatggcggcgaaagcggtgatccgcgacgtaggccgcgtgctggggcatccgtacggctttgtcgatcgtatcagcaaactgatcccgcccgatccggggatgacgctggcgaaagcgtttgaagccgagccgcagctgccggaaatctacgaagcggatgaagaagttaaggcgctgatcgacatggcgcgcaaactggaaggggtcacccgtaacgccggtaagcacgccggtggggtggttatcgcgccgaccaaaattaccgattttgcgccgctttactgcgatgaagagggcaaacatccggtcacccagtttgataaaagcgacgttgaatacgccggactggtgaagttcgacttccttggtttgcgtacgctcaccatcatcaactgggcgctggagatgatcaacaagcggcgggcgaagaatggcgagccgccgctggatatcgctgcgatcccgctggatgataagaaaagcttcgacatgctgcaacgcagcgaaaccacggcggtattccagcttgaaagccgcggcatgaaggacctgatcaagcgtctacaacctgactgcttcgaagatatgatcgccctagtggcactgttccgccccggtccgttgcaaagtgggatggtggataactttatcgaccgtaaacatggtcgtgaagagatctcctatccggacgtacagtggcagcatgaaagcctgaaaccggtactggagccaacctacggcattatcctgtatcaggaacaggtcatgcagattgcgcaggtgctttctggttataccctcggtggcgcggatatgctgcgtcgtgcgatgggtaagaaaaagccggaagagatggctaagcaacgttctgtatttgctgaaggtgcagaaaagaacggaatcaacgctgaactggcgatgaaaatcttcgacctggtggagaaattcgctggttacggatttaacaaaagccactctgcggcctatgctttggtgagttatcaagcgttatggctgaaagcgcactatcctgcggagtttatggcggcggtaatgaccgccgatatggacaacaccgagaaggtggtgggtctggtggatgagtgctggcggatggggctgaaaatcctgccaccagatataaactccggtctttaccatttccacgtcaacgacgacggcgaaatcgtgtatggtattggcgcgatcaaaggggtcggtgaaggtccgattgaggccatcatcgaagcccgtaataaaggcggctacttccgcgaactgtttgatctctgcgcccgtaccgacaccaaaaagttgaaccgtcgcgtgctggaaaaactgatcatgtccggggcgtttgaccgtcttgggccacatcgcgcagcgctgatgaacagcctgggcgatgcgttaaaagcggcagatcaacacgcgaaagcggaagctatcggtcaggccgatatgttcggcgtgctggccgaagagccggaacaaattgaacaatcctacgccagctgccaaccgtggccggagcaggtggtattagatggggaacgtgaaacgttaggcctgtacctgaccggacaccctatcaaccagtatttaaaagagattgagcgttatgtcggaggcgtaaggctgaaagacatgcacccgacagaacgtggtaaagtcatcacggctgcggggctcgttgttgccgcgcgggttatggtcaccaagcgcggcaatcgtatcggtatctgcacgctggatgaccgttccgggcggctggaagtgatgttgtttactgacgccctggataaataccagcaattgctggaaaaagaccgcatacttatcgtcagcggacaggtcagctttgatgacttcagcggtgggcttaaaatgaccgctcgcgaagtgatggatattgacgaagcccgggaaaaatatgctcgcgggcttgctatcagcctgacggacaggcaaattgatgaccagcttttaaaccgactccgtcagtctctggaaccccaccgctctgggacaattccagtacatctctactatcagagggcggatgcacgcgcgcggttgcgttttggcgcgacgtggcgtgtctctccgagcgatcgtttattaaacgatctccgtggcctcattggtagcgagcaggtggaactggagtttgactaatacaggaatactatgagtctgaatttccttgattttgaacagccgattgcagagctggaagcgaaaatcgattctctgactgcggttagccgtcaggatgagaaactggatattaacatcgatgaagaagtgcatcgtctgcgtgaaaaaagcgtagaactgacacgtaaaatcttcgccgatctcggtgcatggcagattgcgcaactggcacgccatccacagcgtccttataccctggattacgttcgcctggcatttgatgaatttgacgaactggctggcgaccgcgcgtatgcagacgataaagctatcgtcggtggtatcgcccgtctcgatggtcgtccggtgatgatcattggtcatcaaaaaggtcgtgaaaccaaagaaaaaattcgccgtaactttggtatgccagcgccagaaggttaccgcaaagcactgcgtctgatgcaaatggctgaacgctttaagatgcctatcatcacctttatcgacaccccgggggcttatcctggcgtgggcgcagaagagcgtggtcagtctgaagccattgcacgcaacctgcgtgaaatgtctcgcctcggcgtaccggtagtttgtacggttatcggtgaaggtggttctggcggtgcgctggcgattggcgtgggcgataaagtgaatatgctgcaatacagcacctattccgttatcagcccggaaggttgtgcgtccattctgtggaagagcgccgacaaagcgccgctggcggctgaagcgatgggtatcattgctccgcgtctgaaagaactgaaactgatcgactccatcatcccggaaccactgggtggtgctcaccgtaacccggaagcgatggcggcaagcttgaaagcgcaactgctggcggatctggccgatctcgacgtgttaagcactgaagatttaaaaaatcgtcgttatcagcgcctgatgagctacggttacgcgtaattcgcaaaagttctgaaaaagggtcacttcggtggcccttttttatcgccacggtttgagcaggctatgattaaggaaggattttccaggaggaacacatgaacatcattgccattatgggaccgcatggcgtcttttataaagatgagcccatcaaagaactggagagcgcgctggtggcgcaaggctttcagattatctggccacaaaacagcgttgatttgctgaaatttatcgagcataaccctcgaatttgcggcgtgatttttgactgggatgagtacagtctcgatttatgtagcgatatcaatcagcttaatgaatatctcccgctttatgccttcatcaacacccacagcacgatggatgtcagcgtgcaggatatgcggatggcgctctggttttttgaatatgcgctggggcaggcggaagatatcgccattcgtatgcgtcagtacaccgacgaatatcttgataacattacaccgccgttcacgaaagccttgtttacctacgtcaaagagcggaagtacaccttttgtacgccggggcatatgggcggcaccgcatatcaaaaaagcccggttggctgtctgttttatgatttttcggcgggaatactcttaaggctgatgtctctattagcgtcaccgagcttggtagcttgctcgaccacaccgggccacacctggaagcggaagagtacatcgcgcggacttttggcgcggaacagagttatatcgttaccaacggaacaagcacgagcaacaaaattgtgggtatgtacgccgcgccatccggcagtacgctgttgatcgaccgcaattgtcataaaagcctggcgcatctgttgatgatgaacgatgtagtgccagtctggctgaaaccgacgcgtaatgcgttggggattcttggtgggatcccgcgccgtgaatttactcgcgacagcatcgaagagaaagtcgctgctaccacgcaagcacaatggccggttcatgcggtgatcaccaactccacctatgatggcttgctctacaacaccgactggatcaaacagacgctggatgtcccgagcattcacttcgattctgcctgggtgccgtacacccattttcatccgatctaccagggtaaaagtggtatgagcggcgagcgtgttgcgggaaaagtgatcttcgaaacgcaaagcacccacaaaatgctggcggcgttaagccaggctagcctgatccacattaaaggcgagtatgacgaagaggcctttaacgaagcctttatgatgcataccaccaccagccccagttatcccattgttgctagcgttgagacggcggcggcgatgctgcgtggtaatccgggcaaacggctgattaaccgtagtgtagaacgagctctgcattttcgcaaagaggtccagcggctgcgggaagagtctgacggttggtttttcgatatctggcaaccgccgcaggtggatgaagccgaatgctggcccgttgcgcctggcgaacagtggcacggctttaacgatgcggatgccgatcatatgtttctcgatccggttaaagtcactattttgacaccggggatggacgagcagggcaatatgagcgaggaggggatcccggcggcgctggtagcaaaattcctcgacgaacgtgggatcgtagtagagaaaaccggcccttataacctgctgtttctctttagtattggcatcgataaaaccaaagcaatgggattattgcgtgggttgacggaattcaaacgctcttacgatctcaacctgcggatcaaaaatatgctacccgatctctatgcagaagatcccgatttctaccgcaatatgcgtattcaggatctggcacaagggatccataagctgattcgtaaacacgatcttcccggtttgatgttgcgggcattcgatactttgccggagatgatcatgacgccacatcaggcatggcaacgacaaattaaaggcgaagtagaaaccattgcgctggaacaactggtcggtagagtaagcgcaaatatgatcctgccttatccaccgggcgtaccgctgttgatgcctggagaaatgctgaccaaagagagccgcacagtactcgattttctactgatgctttgttccgtcgggcaacattaccccggttttgaaacggatattcacggcgcgaaacaggacgaagacggcgtttaccgcgtacgagtcctaaaaatggcgggataacttgccagagcggcttccgggcgagtaacgtgctgttaacaaataaaggagacgttatgctgggtttaaaacaggttcaccatattgcgattattgcgacggattatgcggtgagcaaagctttctactgcgatattcttggtttcacgctgcaaagcgaagtctatcgcgaagcgcgcgacagttggaaaggggatttggcgcttaatgggcaatatgtgattgagcttttcagttttccgttcccgccggaacgacccagccgaccggaagcttgcggtctgcgtcatctggcttttagcgttgatgacatcgatgcggcagtggcgcaccttgaaagccataacgtgaagtgtgaaaccatccgtgtcgatccatacacgcaaaaacgcttcaccttctttaacgatccggacgggctgccgttggaactgtatgagcagtaaggcttgtcatcgccgcatttgcccggtaacgtgccgggcattgctactgtaaaatcgcaccatcatgacactcacgctcaatagacaacttctcaccagtcgccagattctggtggcctttagcggcgggcttgactccaccgttctgctgcatcagttggtgcagtggcggacggaaaatccgggtgtcgctctgcgcgctattcatgtgcatcacggtttaagtgccaatgccgatgcctgggttacgcattgcgaaaacgtctgccaacagtggcaggtgccgctggtggtcgaacgcgtacaacttgcgcaagaaggactgggcattgaggcccaggcgcggcaggcacgttatcaggcatttgcccgcaccttgttgcccggtgaagtgctggtcaccgcgcaacatctcgacgatcaatgtgaaacctttctgctggcgctaaaacgcggcagtggccctgccgggcttagcgctatggcggaagtcagcgagtttgccggaacgcggcttattcgcccgttgctcgcccgcacgcggggggaactggtgcagtgggcgcgtcagtatgatttacgctggattgaagacgaaagtaatcaggacgacagttacgatcgtaactttctgcgcctgcgcgtagtgccgttattgcagcagcgttggccgcattttgccgaagcaacggcccgcagcgccgcactttgtgctgaacaagagagcctgctggatgaactgctggcagatgatttagcacactgtcaaagcccgcaggggacgctgcagattgtgccaatgctggcgatgagtgatgcccgccgcgcggcgattatccgccgctggctggcagggcagaatgcaccgatgccttcccgcgacgcgttggtgaggatctggcaggaagtggcgctggcgcgggaagatgccagtccctgtttacgtttgggcgcgtttgaaatccgacgctatcagagccaactgtggtggattaaatccgtcaccgggcaaagcgaaaacattgtgccgtggcagacgtggcttcaaccgctggaattaccggcggggctgggaagtgtacagcttaatgcgggaggcgatattcgccctccgcgtgcagacgaagcggtcagcgtgcgtttcaaagcgccaggattgctgcatattgtcgggcgtaacggcggacgtaagctaaagaaaatctggcaagagctgggcgtgccgccgtggctacgtgacaccacgccactgctgttttatggcgaaacgctgattgcggcggcaggggtatttgtgacgcaagaaggtgtggctgaaggtgagaatggcgtaagttttgtctggcagaaaacgcttagttaagtgaaagccggataagacgcatcaaacgtcgcatccggcgaaagtcaatcaggattcgcttaccaccaccgtaccgatttccgggtggctaaagctggtaattttatccagacgcagctcgcgggtttcgccagcggcctcgacgaccaggtactccacatttttgcgggagactaaatcactggcttttgcctgcaatttttcgccatctttcagctcaagtgtcagcattaaatgatgctggcaggcgagctcaagattatcgtaatcatcacaattgattggttgatacgtatcattcattgacataatcgctcaccagtaagtttgccgcagcgtatgctgctttttccctgacagcctcagaaagggcgtcgtcggcagccatttcattcagcactttcaaaacgcagcccagcgcgtccggaacgtatcctaagtctccgctggcgatttccgcgtaccgcttgcgtattaactcacaatatttttccacatgccctcctgtcagcactctgacttaaccgtggatgcaagtctaagcctacgaagataaactctgtttcgcaaggtgactataccacactcatttctgcaatatcagcgccgcaactgcacgtattccgttacaatggcctcctgattcgaaaggagttttcttatggcgcttaaagcgacaatttataaagcgacggttaatgtggccgatctcgaccgcaaccagtttctcgatgcctctctgacgctggcgcgccatcctagtgaaacccaggagcgtatgatgctgcgcttgctggcgtggctgaaatatgctgatgaacgtctgcaatttacccgtggtttgtgtgccgatgatgagccggaagcgtggctgcgtaacgatcacctgggcattgatttgtggattgagctggggctgccggatgagcggcggattaagaaagcctgcacccaggccgcagaagtggcgctgtttacctataatagtcgggcggcgcaaatctggtggcagcaaaatcagagcaaatgtgtgcagtttgccaatctttccgtctggtatctggacgatgaacaactggcgaaagtaagcgcctttgccgatcgtaccatgacgctgcaggcaacgattcaggatggcgtgatctggttaagcgatgataagaataatctggaagtgaacttaaccgcctggcaacaacctagttgaactaaaccgcctggcaacaaccttcatgattgtgatttcccgacatgttgctattcccgatggtgagcttgagatcaccgccattcgtgcgcagggcgcgggcgggcagcatgttaataagaccagtacggctattcatctgcgttttgacattcgggcgtccagcctgccagagtattacaaagagcgtctgctcgccgccagccatcatttgatcagcagtgatggcgtgattgtcattaaggcacaggaataccgcagtcaggaactgaaccgcgaagcagctctggcccggctggtggctatgattaaagaattaacaacagaaaaaaaagcccgacgacccacgcggcccacccgtgcaagcaaagagcgcaggctggcaagcaaagcacaaaaaagtagcgtgaaggcgatgcgcggcaaagtgcgcagcggtcgggaataaaaagaaggaatggatggtgaaaaaagcgatagtgacagcgatggctgtaatcagcctctttactctgatgggatgtaataatcgggccgaagtcgatacgctttctccggcgcaggctgccgaactgaaaccgatgccgcaaagttggcgcggcgtgctgccgtgtgccgattgcgaaggaatcgaaacctctctgttcctcgaaaaagacggaacatgggtgatgaatgagcgttatctcggtgctcgtgaagaaccttcctccttcgcttcctacggtacatgggcgcgaaccgctgacaagctggtattaaccgacagcaaaggtgaaaagagttattatcgggcgaaaggcgatgcgctggagatgctcgatcgtgaaggcaatccgattgaaagccagttcaactatacgctggaagcggcacaatccagtttacctatgacgccgatgaccctgcggggcatgtatttttatatggctgatgcggcgaccttcactgattgcgcgaccggaaaacgtttcatggtagcgaataacgcagagctggagcgtagctacctggctgcgcgcggtcacagtgaaaaaccggtgttactgagtgtagaaggtcactttacgcttgagggtaatccggataccggtgcgccgactaaagtattggcacccgatacggcagggaaattttaccccaaccaggattgcagtagtttggggcagtaacccgtcttgagacagaaacaaacgcaaaacaggccagaaggatatatttcaacattttgaatttgcacgttttttgtaggccggataaggcgtttacgccgcatccggcaatggtgctcaacgcctgatgcgacgctggcgcgtcttatcatgcctacgacccccctcataccttaaggcggataaggcatttactttatcaccgggtcaaaccaacaaagcgacccgccttgatataaatcccaggcttcaggtgcccaacatactgtaactgcgtttctggcttaaacgcagagacatcaccaatacgcatatgcatcagatcggcagggctaatccagccgctttgcgccagtgtaagtggatgcccggctttggcaaaggcatccgtgacaaattcgctacaaaaccagctctttttgtctccttcgcccacactgcttaactgcgctttcgccaggccgctgacgcactgttggcgaaaatcctcggagaacggattcagactgcacatctggcgagtcaccataaagggaataaattcgacaatgccgcgatagttataaccgctatctttgattttattggcaaacgcggtgatatctgtggcttgttgcggggtaagatccgggactcgtaagacgaaaagcttatcactatgcttcatcgcttttttaagggaaacgatctggacgccagcgcctgtcgcttctgcaacgttattatcacccagaaagattgcaacgtgactcacagaggaagtgctgaagacgcggattccaaaactggttaccccaaggctactggagaacagcaaatcgccgggtttgagatcaggtgccgttatttcttttatactttgttcggtgaaagagctttgatgctggaatttgacagcccatgtttttgcctcggcatctactgctgtggcacttgggtctggctggctgatatcaacggtacaagcgctaagtaaaagaaagctggggagaaacaggcggcagtacgcctttggtttatccattttatacaatccatgtaaaaaaagggccctgaaattcaggaccctttctggcatcagcctttaatctgtttcaccagatattcgacgatgtcaccagtcttaattaactgtttctcgccgttgcgacgatatttatattcgatatcgtcgttgtcgaggttacggtcgcccagcacaatagtgtgcggaataccgatcagttccatatcagcaaacatcacgcccggacgctctttgcggtcatccagcagcacttcgataccttgtgcacgcagttcgctgtacagtttctcagcaagctcttgtacgcggaaggatttgtgcatgttcatcggcagaatcgccacctggaacggcgcgatagcgtcaggccatacgatgcctcgttcgtcgtagttctgctcaatcgccgcagctaccacacgcgttaccccgataccgtagcaacccatcgtcaggatttggttgcggccatcttcaccctgtacggaggctttcagtgcttcggagtacttggtacccagctggaagatgtgaccaacttcgataccacgtttgatcagcagcctaccctggccatccgggcttggatcgccagccaccacgttacggatatctgcaacttccggggtagcgacatcgcgatcccagttgatgccgaagtagtgtttaccatcgatgttagcaccagcagcgaaatcactcatcgccgcaacggtacggtcaatcaccaccggaatcggcatgtttaccggacccagactacccggaccggctttaaccacggcacgaatttcttcttcggtcgcgaaagtcagcgggcttgcaacctgcggcagtttttctgctttaacttcgttcagctcgtgatcaccgcgcaccagcagcgcaacctgcgggaagctgctgccttcaaccgctttaaccagcagagtcttaaccgttttctcaatcggcagattgaactgttcaaccagttccgcgatggttttcgcgttcggcgtatcaaccagcgtcatttcctgggtagcagcagcgcgcggttctttcggcgcgatagcttctgccagttcaatgttcgctgcatagtcagaggtgtcggagaagaccacatcgtcttcaccgctctgcgccagcacctggaattcgtgagaggcgctgccgccgatagaaccggtgtcggcttgtacggcgcggaaatccagccccatgcggctgaagattttgctgtaggccgcatacattgcatcgtaggtttcctgcagggattcctgagaagtatggaaagagtaagcatctttcatcaggaattcgcgggaacgcatgacgccgaaacgcggacgcacttcgtcgcggaacttggtctggatctgatagaagttcagcggcagctgtttgtaagagctaagctcgttacgaatcaggtcagtgataacttcttcatgagttgggccgagtacgaacggacgctcgccacggtcaacaaaacgcagcagttccggaccgtactgttcccaacgaccactctcttgccacaaatcggctggctgaaccaccggcatgctcacctcgatcgcaccggcgttgttcatctcttcacgcacgatgttttcgacttttttcagaacgcgcacgccggtcggcagccaggtatataacccggaggccagcttgcggatcatcccggcgcgcagcatcagctgatggctgatcacctcggcgtcggcaggtgtctccttgagagtggagagcaggtattggctagtacgcatgttgttacggttccagttggaaggtagaacaggctcaaggcgagcctgggacaaaaaaagtgatttagtttaccagtgcaaaagaaatgtcaaaagagaagggcgtgaatttaacgcggttccagcgcaaagacttcaaaacctgcgtcggtgacgcgccagcgaacgttaaaatcatgtagccagacggcataggttttgcccgtttcctcacctttacgataggccgggcgcgggtcctgcgccagtacttcgcggataaacagcgttaactgcggataacgcttctccagcgtcaaaagctgcttttcgacctctgcggtaaaactcaccgccatctctgcagctggcgcactttgcgcatagctggcactggcatcgggaaggctttcggcaaaggggagatacggtttgatatccactaccggcgtaccatcgaccagatccagactgccgagcttcagaatcacgctgtctttatggcaaacaacctctttcagctctaccaggctcatgccaattgggttagggcggaaagtagagcgtgttgcgaaaacccccattctggcgttaccgccgaggcgcggtggacgcacagtcggacgccagccgccttccatcgtttgatgaaagacgaaaaggatccataaatggctgaacgcttccaggccgcgaacggcgtcggcctggttgtagggagcaatgagatgcagttcgccgttggcgctttttaccagacctggctggcgcggaacggcgaacttttctttataggggctgcgaataacgcctatttgctcgaactggaaactgctcatttcgccgtaatgttaagcgcagaaccgatacatacagcctgacgatagcagcctggcgtaccgctggtgacttcgcagctatgcagtaatacagcattggctttcattttagaggcgttgatttgcatccgcttacgtgcggttggaatgctcggcggagagtcctgattagaggcctggcaagagtcgccactgacttcaccgagatcgcggaacggtttgccgactaattcttctgcattggtataaattcggaccggcgtggcgcgcggcgctttcggttttgcaggctccgctttcggctggggtgcagtgctttgaacgggttcgacaggggatctgcttaacatggaacagccgcttagcatgagtgctactaaacagatcggtaaagcacgcatagtatttcctcaatgtatgatcaaaacgtcaatattgaatcaggagcttgtaaaaatgacaagacgggcaagcgcccgtcctgaatgatattacaaattgtggaaacagcctaaaaattaccagcctttaacagctccgccgttaaacactttgtttgctgcttcgtaaacttcgtcagactgataagcctggacgaatttcttcacgttctcggcgtctttgttatcttcacgcgtcacgatcaggtttacgtacggggactctttatcttcaacaaagataccgtctttcgccggagtcaggccaatctggctggcataggtggtattgataactgccagagcgatttgcgcgtcgtccagagaacgcggcagttgcggtgcttccagttcaacaattttcagatttttggggttctcaacaacatcaagaacggtcggcagcaggccaacgccatctttcagtttgatcaagcccactttttgcagcagcagcagactacgaccaaggttagttgggtcgtttggcacggcaacctggctaccatcctgcagttcatccagacttttgattttcttggagtaaccagcaatcggataaacaaaagtgttgcctactgcgaccagtttgtagccacgatctttcagttgctgatcaaggtacggtttatgctggaaggcgttggcgtcgatatcgcctttgctcaatgcttcgtttggcagaacatagtcgttgaaggttaccagctcaacgtccaggccatatttgtctttcgcaactttctgcgcgacttctgcaacctgctgttcggcaccaacaatcacgccgactttaatgtggtttggatctttttcatcctgaccgcagcctaccagtgccagacttccgatcagggctcccactgccgcaaaggttttgaatttgaacgccataccttattccttcttcaattatttatgttgtgttgaacgttacttgcgagtgacagcccggacgatgcggtcgcctgcgaactgaattaaataaaccagaatgaccagcaataccagtaccgtattcatcaccgtcgcgttatagccgatgtagccatactgatagccaatctgacctaaaccaccggcaccgactgcaccacccatcgcggaataaccgaccagggtaatcagggtgatagttgccgcattcaccagacccggcagcgcttccggtaacagcaccttacggacgatctgcatcggcgtggcacccattgcgcgggaagcttcaattaacccggttgggatctccagcagagcgttctcgaccatacgggcaataaacggtgctgcaccaacggttaacggaacaatcgctgcctgcaaaccaatgcttgtaccgacaataacgcgggtaaacggaatcatccatacaagcaagataatgaacgggatggaacggaaaatgttcacaatcgcagaaacggtacgatacagcttcgcgttagcaataatttgccccggacgcgtgacataaagcagaacgccaaccggcagaccaatcacaaagccaaaaaaaccggatacgaaggtcattgccagcgtttcccatacgccacgaaccagcagccacatcatcggctcagacataacccagtacctctacttttacatggtgttcctgcagccaggcaatggcggcttgcgtatcttgttgtgtgccgtgcatttcagtcagcatgatgccgaacttaacgccaccggcgtaatccatctgcgcgctaataatgttgttgttgacgttgaaacgacgcgcggtttcagaaagcagtggggcatcgacgctttgaccggtaaactccagacgcagcatcggcacgcagtcagtaaatggctccgcttgcagacgttcctggtaatcttccgggatatccagatgcagggtgctctgaataaacttctgcgccagcggcgttttcggatggctgaacacttcacttaccgtgtcctgctcgatcagttctccattgctgatgaccgccacgcaatcacaaatgcgcttcacaacgtccatttcgtgggtgatcaacagaatcgtcaaccccagacggcggttgatgtctttcagcagttcgagaatagaacgtgtcgttgccgggtccagcgcgctggtggcttcatcacacagcaatactttgggattgctggctaacgcacgggcaattgccacacgttgtttctgcccaccggaaagattgctcgggtagctatcatgcttatcgccaagaccaaccaaactcagcaattccgtcacgcgacgtttgacctcgtctttcggtgtgttgtccagctccagcggcagagccacgttgccaaaaacagtacggctagagagcaggttaaaatgctggaaaatcataccaatctggcggcgagctttggtcaactcggattcactcagcgtggtcagttcctggccatcgaccagcacgctaccctcggttgggcgctccagcaggtttacacaacgtataagcgtactcttacccgcgccactggcaccgataacgccataaatttgtccagctggcacatgcaggctgacgttgttcaacgcctggatggtgcgggtgccctggtggaacactttggtgatattgctaagttttatcattgattatttattatcgtcattaagttagtcgtggcatctcgaatgcctgaaacgggcaacgccgtcaatgaaatggatgttaaggcatccagacgtctaaatcaatcaggtttatgcgaagagcactttcttgcaggtcgaaacatgcgatactagcgtcacatgccttattaaggagctataaaaggtggcgaagagcgtacccgcaatttttcttgaccgtgatggcaccattaatgtcgatcacggctatgtccatgagatcgacaactttgaatttatcgacggtgttattgacgccatgcgcgagctaaaaaaaatgggctttgcgctggtggtagtaaccaaccagtctggcattgctcgcggtaaatttaccgaagcacagtttgaaacgctgaccgagtggatggactggagcctggcggaccgagatgtcgatctggatggtatctattattgcccgcatcatccgcagggtagtgttgaagagtttcgccaggtctgcgattgccgcaaaccacatccggggatgcttttgagtgcacgcgattatttgcatattgatatggccgcttcttatatggtgggcgataaattagaagatatgcaggcagcggttgcggcgaacgtgggaacaaaagtgctggtgcgtacgggtaaacctattacgcctgaagcagaaaacgcggcggattgggtgttaaatagcctggcagacctgccgcaagcgataaaaaagcagcaaaaaccggcacaatgattaaaagatgagcggttgaaataaaaatgcatttttccgcttgtcttcctgagccgactccctataatgcgcctccatcgacacggcggatgtgaatcacttcacacaaacagccggttcggttgaagagaaaaatcctgaaattcagggttgactctgaaagaggaaagcgtaatatacgccacctcgcgacagtgagctgaaagccgcgtcgcaactgctctttaacaatttatcagacaatctgtgtgggcactcgaagatacggattcttaacgtcgcaagacgaaaaatgaataccaagtctcaagagtgaacacgtaattcattacaaagtttaattctttgagcatcaaacttttaaattgaagagtttgatcatggctcagattgaacgctggcggcaggcctaacacatgcaagtcgaacggtaacaggaagaagcttgcttctttgctgacgagtggcggacgggtgagtaatgtctgggaaactgcctgatggagggggataactactggaaacggtagctaataccgcataacgtcgcaagaccaaagagggggaccttcgggcctcttgccatcggatgtgcccagatgggattagctagtaggtggggtaacggctcacctaggcgacgatccctagctggtctgagaggatgaccagccacactggaactgagacacggtccagactcctacgggaggcagcagtggggaatattgcacaatgggcgcaagcctgatgcagccatgccgcgtgtatgaagaaggccttcgggttgtaaagtactttcagcggggaggaagggagtaaagttaatacctttgctcattgacgttacccgcagaagaagcaccggctaactccgtgccagcagccgcggtaatacggagggtgcaagcgttaatcggaattactgggcgtaaagcgcacgcaggcggtttgttaagtcagatgtgaaatccccgggctcaacctgggaactgcatctgatactggcaagcttgagtctcgtagaggggggtagaattccaggtgtagcggtgaaatgcgtagagatctggaggaataccggtggcgaaggcggccccctggacgaagactgacgctcaggtgcgaaagcgtggggagcaaacaggattagataccctggtagtccacgccgtaaacgatgtcgacttggaggttgtgcccttgaggcgtggcttccggagctaacgcgttaagtcgaccgcctggggagtacggccgcaaggttaaaactcaaatgaattgacgggggcccgcacaagcggtggagcatgtggtttaattcgatgcaacgcgaagaaccttacctggtcttgacatccacagaactttccagagatggattggtgccttcgggaactgtgagacaggtgctgcatggctgtcgtcagctcgtgttgtgaaatgttgggttaagtcccgcaacgagcgcaacccttatcttttgttgccagcggtccggccgggaactcaaaggagactgccagtgataaactggaggaaggtggggatgacgtcaagtcatcatggcccttacgaccagggctacacacgtgctacaatggcgcatacaaagagaagcgacctcgcgagagcaagcggacctcataaagtgcgtcgtagtccggattggagtctgcaactcgactccatgaagtcggaatcgctagtaatcgtggatcagaatgccacggtgaatacgttcccgggccttgtacacaccgcccgtcacaccatgggagtgggttgcaaaagaagtaggtagcttaaccttcgggagggcgcttaccactttgtgattcatgactggggtgaagtcgtaacaaggtaaccgtaggggaacctgcggttggatcacctccttaccttaaagaagcgtactttgcagtgctcacacagattgtctgatgaaaatgagcagtaaaacctctacaggcttgtagctcaggtggttagagcgcacccctgataagggtgaggtcggtggttcaagtccactcaggcctaccaaatttgcacggcaaatttgaagaggttttaactacatgttatggggctatagctcagctgggagagcgcctgctttgcacgcaggaggtctgcggttcgatcccgcatagctccaccatctctgtagtggttaaataaaaaatacttcagagtgtacctgcaaaggttcactgcgaagttttgctctttaaaaatctggatcaagctgaaaattgaaacactgaacaatgaaagttgttcgtgagtctctcaaattttcgcaacacgatgatggatcgcaagaaacatcttcgggttgtgaggttaagcgactaagcgtacacggtggatgccctggcagtcagaggcgatgaaggacgtgctaatctgcgataagcgtcggtaaggtgatatgaaccgttataaccggcgatttccgaatggggaaacccagtgtgtttcgacacactatcattaactgaatccataggttaatgaggcgaaccgggggaactgaaacatctaagtaccccgaggaaaagaaatcaaccgagattcccccagtagcggcgagcgaacggggaggagcccagagcctgaatcagtgtgtgtgttagtggaagcgtctggaaaggcgcgcgatacagggtgacagccccgtacacaaaaatgcacatgctgtgagctcgatgagtagggcgggacacgtggtatcctgtctgaatatggggggggaccatcctccaaggctaaatactcctgactgaccgatagtgaaccagtaccgtgagggaaaggcgaaaagaaccccggcgaggggagtgaaaaagaacctgaaaccgtgtacgtacaagcagtgggagcatgcttaggcgtgtgactgcgtaccttttgtataatgggtcagcgacttatattctgtagcaaggttaaccgaataggggagccgaagggaaaccgagtcttaactgggcgttaagttgcagggtatagacccgaaacccggtgatctagccatgggcaggttgaaggttgggtaacactaactggaggaccgaaccgactaatgttgaaaaattagcggatgacttgtggctgggggtgaaaggccaatcaaaccgggagatagctggttctccccgaaagctatttaggtagcgcctcgtgaactcatctccgggggtagagcactgtttcggcaagggggtcatcccgacttaccaacccgatgcaaactgcgaataccggagaatgttatcacgggagacacacggcgggtgctaacgtccgtcgtgaagagggaaacaacccagaccgccagctaaggtcccaaagtcatggttaagtgggaaacgatgtgggaaggcccagacagccaggatgttggcttagaagcagccatcatttaaagaaagcgtaatagctcactggtcgagtcggcctgcgcggaagatgtaacggggctaaaccatgcaccgaagctgcggcagcgacgcttatgcgttgttgggtaggggagcgttctgtaagcctgtgaaggtgtactgtgaggtatgctggaggtatcagaagtgcgaatgctgacataagtaacgataaagcgggtgaaaagcccgctcgccggaagaccaagggttcctgtccaacgttaatcggggcagggtgagtcgacccctaaggcgaggccgaaaggcgtagtcgatgggaaacaggttaatattcctgtacttggtgttactgcgaaggggggacggagaaggctatgttggccgggcgacggttgtcccggtttaagcgtgtaggctggttttccaggcaaatccggaaaatcaaggctgaggcgtgatgacgaggcactacggtgctgaagcaacaaatgccctgcttccaggaaaagcctctaagcatcaggtaacatcaaatcgtaccccaaaccgacacaggtggtcaggtagagaataccaaggcgcttgagagaactcgggtgaaggaactaggcaaaatggtgccgtaacttcgggagaaggcacgctgatatgtaggtgaagcgacttgctcgtggagctgaaatcagtcgaagataccagctggctgcaactgtttattaaaaacacagcactgtgcaaacacgaaagtggacgtatacggtgtgacgcctgcccggtgccggaaggttaattgatggggttagcgcaagcgaagctcttgatcgaagccccggtaaacggcggccgtaactataacggtcctaaggtagcgaaattccttgtcgggtaagttccgacctgcacgaatggcgtaatgatggccaggctgtctccacccgagactcagtgaaattgaactcgctgtgaagatgcagtgtacccgcggcaagacggaaagaccccgtgaacctttactatagcttgacactgaacattgagccttgatgtgtaggataggtgggaggctttgaagtgtggacgccagtctgcatggagccgaccttgaaataccaccctttaatgtttgatgttctaacgttgacccgtaatccgggttgcggacagtgtctggtgggtagtttgactggggcggtctcctcctaaagagtaacggaggagcacgaaggttggctaatcctggtcggacatcaggaggttagtgcaatggcataagccagcttgactgcgagcgtgacggcgcgagcaggtgcgaaagcaggtcatagtgatccggtggttctgaatggaagggccatcgctcaacggataaaaggtactccggggataacaggctgataccgcccaagagttcatatcgacggcggtgtttggcacctcgatgtcggctcatcacatcctggggctgaagtaggtcccaagggtatggctgttcgccatttaaagtggtacgcgagctgggtttagaacgtcgtgagacagttcggtccctatctgccgtgggcgctggagaactgaggggggctgctcctagtacgagaggaccggagtggacgcatcactggtgttcgggttgtcatgccaatggcactgcccggtagctaaatgcggaagagataagtgctgaaagcatctaagcacgaaacttgccccgagatgagttctccctgactccttgagagtcctgaaggaacgttgaagacgacgacgttgataggccgggtgtgtaagcgcagcgatgcgttgagctaaccggtactaatgaaccgtgaggcttaaccttacaacgccgaagctgttttggcggattgagagaagattttcagcctgatacagattaaatcagaacgcagaagcggtctgataaaacagaatttgcctggcggccgtagcgcggtggtcccacctgaccccatgccgaactcagaagtgaaacgccgtagcgccgatggtagtgtggggtctccccatgcgagagtagggaactgccaggcatcaaattaagcagtaagccggtcataaaaccggtggttgtaaaagaattcggtggagcggtagttcagtcggttagaatacctgcctgtcacgcagggggtcgcgggttcgagtcccgtccgttccgccacttattaagaagcctcgagttaacgctcgaggttttttttcgtctgtatatctattattgccagaatcgcaaaaatcctctgcattttacgctctttttcctcaacagtctgaagcccataatcacctcagttaacgaaaatagcattaaaagaggcatattatggctatccctgcatttggtttaggtactttccgtctgaaagacgacgttgttattagttctgtgataacggcgcttgaacttggttatcgcgcaattgataccgcacaaatctatgataacgaagccgcagtaggtcaggcgattgcagaaagtggcgtgccacgtcatgaactctacatcaccactaaaatctggattgaaaatctcagcaaagacaaattgatcccaagtctgaaagagagcctgcaaaaattgcgtaccgattatgttgatctgacgctaatccactggccgagtccagacgatgaagtctctgttgaagagtttatgcaggcgctgctggaagccaaaaaacaagggctgacgcgtgagatcggtatttccaacttcacgatcccgttgatggaaaaagcgattgctgctgttggtgctgaaaacatcgctactaaccagattgaactctctccttatctgcaaaaccgtaaagtggttgcctgggctaaacagcacggcatccatattacttcctatatgacgctggcgtatggtaaggccctgaaagatgaggttattgctcgtatcgcagctaaacacaatgcgactccggcacaagtgattctggcgtgggctatgggggaaggttacagtgtaattccttcttctactaaacgtaaaaacctggaaagtaatcttaaggcacaaaatttacagcttgatgccgaagataaaaaagcgatcgccgcactggattgcaacgaccgcctggttagcccggaaggtctggctcctgaatgggattaagcctctctgacagctcctccgggagctgtttttacatgctcgctaaggaaatcgataaaagcccggatgcgcgtacttaccgcacggtcgctgtaatagacggcactgaatggcatttccactggcaacactttatctgccattaactccaccaattctccgcgagcgatttctttgtcgatcatgtagtcggacaaacacgcaatcccgttgccactcaggcaaagctgtttcagtgtttccccactattggaactcaaaccgtacttcacctcatgtaattgtccatcgctacgggctatcggccaggtattgagggaagcgggttcagtgaatcccaggcaaatatgttgctttaaatcgtcgatcgtttctggcttcccgtagcgggaaatataatcgggggaggcgataatttttcgataactgttaaataacggcctggcacgtaagctggaatccgttaacgtaccagcgcgtatcgcgacatccacttttctttcgatcaaattaataatcgtttcggaggagactaggctcaaagtgacttccggatagcgttcacggaaaggcttaattaacggcatcagaaagtgcagcaccactggagttgcggcatcgatccgtaacagtccacgcggtgtattacgcgtctccataatttcactttctgccgctgccatctcctgcaaaatactctgtacgcgacgaaaataacgctcgccttcttccgtcaggctaagttgtcgcgtggtccgattaagcaggctaacgccaagtttcatctccagctttttcaccgcccggcttaccgcactgtttgcttgccctaattgttccgctgcccggctaaagctgccgctttcgacgacgctaacaaaaatggcgagttcttcgctcgtggctttcatttttgctcctgttgcaaaatagaagagatattttgaatttatttgtcattaaaccatcaggatgcgtgatatgtcatgcgatttaatgttctccataatgagcaaaattctgaccggtgtaagcacttgcttacataacaatatacaattgctcgttgaaagagtgagctaaaatccctataacagtagaaccctcccgagtgcggaagggttgacgtaatagaggtttcaaagtcaaaagtgcgaaaaaacacctatgccatgcgctatgttgccggacaacctgcggaaaggatcttaccgccggggtcttttgcgagcatcggccaggcattaccacctggggaaccgttaagtaccgaagagcgtattcggatcctggtgtggaacatatacaaacagcaacgcgctgaatggttgagcgtattaaagaactacggcaaagatgcacatctggtgttattgcaggaagcgcagacaacgccagagttagtacagtttgcgaccgctaactatcttgccgccgatcaggtacccgctttcgtgctgccacaacatccttctggcgtaatgacccttagcgcggcacatccagtgtattgctgcccgttacgtgaacgagaacccattttgcgtctggcgaagagcgcactggtgacggtctatccattacctgacacccgcctgttgatggtggttaatatacacgccgtcaacttcagtctgggcgtggatgtctatagtaagcagttacttcctattggcgatcagatagctcaccacagcggcccggtcattatggcgggagatttcaatgcctggagccgtagaaggatgaacgcgttatatcgctttgcgcgggaaatgagcctgcgccaggtgcgttttaccgatgatcagcgccgtcgggcgtttggtcgcccgctcgattttgttttctaccgtggtctgaacgtcagtgaagcttctgtactggttacgcgcgcttccgatcacaatccgctactcgttgaattcagtcccggcaagcctgataaataaggtatgagtggtctgccacagggcagaccaacgtttggcgctgcgcaaaacgtgagcgcggtggtggcgtatgacttatctgcccacatgctggatgtcgtggcacaagctgccgaagcccggcaactgaaaaatatcaccacccgccagggatatgccgaaagtctgccatttgccgataacgcatttgatattgttatcagccgttattctgcccatcactggcatgatgttggtgcagcactgcgagaagtgaataggatattgaaacctggcggtaggctgattgtgatggacgtaatgtctccgggtcacccagtgcgcgacatctggttacagacggtagaagcattacgcgatacctctcacgtacgaaactacgccagcggtgagtggttgacgttaatcaatgaagccaatctgatagttgataatttaattacagataagttaccgctggaattttctagttgggtcgcgagaatgcgtacgccagaagcgttagtagacgctattcgcatttaccaacagagcgcaagcacagaggtgagaacgtattttgccttgcagaatgatggctttttcaccagtgatatcatcatggtagatgcacataaagcggcataaataaaaaaggcaccgggggaatcggtgcctttttattatctggtttgtcaggaatctggcatgttgttgtttttcacaaacaacgtcagcttatcgcctggttgcagattcgcagtgtcgctgttccagcgcatcacatctttgatgttcacgccgtggcgtttagcaatgctactaaggctatcgcctttgcgcacacgatacgtaatgctatcgctgttgtttgccagtcgctgtgcgctactgcctgcaccaatcgtcaaactttggcctggcttcagcttagatccgcgcagtttgttccactgctgcaaatctttggtgcttacgccgagacgactagcgatactactaagcgtgtcgccagagcgtacggtgtaaacacggctgttaagcggcgtattgtcggcaaccagcgtgctctgtacagcagcaatttcgccactagccagagattcacgcagttgatctgcatgcttctttggcaccatcacgtactgcgggccacttgcgcccagcgtggagccttttacgccagcgttgaatgtcttcagcttgctgacggaaatccccgccatatctgctaccttcgccatttcaaccgggctgctcaggtgcacacgcgccagagcacggctttcatcggtcgttggcagacgtacgccataacgcttgctgtttttgagaatatcactcaatgccagcattttaggcacgtactgcttcgtttcctgcggcaacggtaagctccagaagtccgtggatttcccacgcgctttgttcgttttaattgccttcatgacccgaccttcgccgctgttataagccgctacggtcagaagccagtcgccgtcaaacattttgttcagacgctgcatcatattcagcgcggcagttgcactagcaacaacatcgcgacgcgcgtcataattgcgggtctgtttcaaaccataattgcgccccgtgctcggaatgatctgccagatgcctgcggcattggcgccagacgttgcgtgaggatcaaaagcgctctccactatgggtagtagtaccagttccataggcatgttacgttttttaacttgccctgctatccagtacatatacggctctgcccgtaaagttacatcgtggagatagctcttattgcgtaaatatttctgtttctgttcgcgaatccggtcattttccggaattcccatctttagctcgtcgccaatgaaagcccacaagtcaccatctggcgcgatagacgtcccatcgtccatccatcgtgcctgacttgtaaactttgctgcttccccttgaccagctgcagaaaggctctgtgcgtgctgttgaacgttgccggtactctggcaacccacgagcaggacagaggcgagtaatatcgcttttgccttcatgtgtgtgtcaatagttgcttaaaagacgaccgatcataacggcgaacggagccgatgacaagaaagttttatcagaacctatctttcttactccttaaccatgcaaaacgctcttcaggttgttgcaataatgtttcttcattaattacattaattaaatcaatatcttccgttcttaaaaaaacattaatttgccgctcatttttcagaattacgggtagtgttatttgattttttgcccgtaactccttaactttacgataataatcatttatggacaaatcgtgcggaagaatactcaaagcaaacttcatattacttaaggtatattcatgagcacaacataccaatgtatcgtcaggtaacgcacttaactttttaagactttgatacatttgacttgctgtcccttcaaacaaccgaccacacccaccagaaaacagtgtgtcgccgcaaaatagataaggtttactgaagtaacagatatgtcctaaagtgtgacccggcgtagcaattacactaaattcatgccccaaaacgaaggcagtttcgccatctttgactacctgtgttgttcccttatcttgtgtctcttgtggaccatacaccacaatttgtggaaacttttccaccagttcttttacgccgccaacgtgatcgtggtgatggtgggtgagaaatatggcctccggttgccagttattggcggcaatggcgtttaatactggctctgcgtctccgggatcgacaatcaggcagcgacctgcttcatcattcaaaacccagatgtaattgtcatcaaaggcgggaatactgttaagattcatagattacctctcagtgtgaaacggaaggttgtgatgaaaccggcaagagtccctcaaactgtcgtggctcctgattgctggggcgatttgccctggggaaagctttatcgcaaggcgctggagcgccagctcaacccgtggttcactaaaatgtatggttttcatctgcttaagattggcaatttaagcgcagaaatcaattgcgaagcgtgcgcggtttctcatcaagtgaatgtttctgcgcaaggaatgcccgtccaggtacaggcggacccacttcatcttccttttgccgataaatccgttgatgtttgtctactggcacatacattgccgtggtgcaccgatccgcatcgtttattgcgtgaagccgatcgggtattgattgatgatggctggctggtcattagtggcttcaatcccatcagttttatgggattacgcaaacttgtgccggtattgcgcaaaaccagcccctataacagccggatgtttactctgatgcggcagctggactggctctctttgttgaattttgaagtgctacacgccagccgtttccacgttctcccgtggaacaaacacggaggaaaactattgaatgcgcatattcctgcgcttggttgcttacaacttattgttgcccggaaacggactattcctttaacgctaaatccgatgaaacagagtaaaaacaagccacgaattcgccaggcggttggagccacccggcaatgtcgtaaaccacaggcttaaacttcaacttggtagcctgtatcttccagtgtgggattcatcgccgcggcacgagccagttcatcacagcgttcgttttccgggtgtccggcatggcctttaacccattcccatttgatttgatgctgccccaatgcagcatcaagacgttgccagagatcgacattttttactggttttttgtctgcggttttccagccacgttttttccagttatggatccactgggtgataccctggcggacatactggctgtcggtactcaaaatgacttcgcaatgttcttttaacgcctccagcgcgacaatagcggccatcaactccatacggttgttggtggtgcgggtgtagccagcgctaaaggttttctcgcgtccgcgatagcgtaaaatagcgccgtaacccccaggtcctggattgcccagacagctaccatcggtgaaaatttctacctgtttaagcatctctggtagacttcctgtaattgaatcgaactgtaaaacgacaagtctgacataaatgaccgctatgagcactgcaattacacgccagatcgttctcgataccgaaaccaccggtatgaaccagattggtgcgcactatgaaggccacaagatcattgagattggtgccgttgaagtggtgaaccgtcgcctgacgggcaataacttccatgtttatctcaaacccgatcggctggtggatccggaagcctttggcgtacatggtattgccgatgaatttttgctcgataagcccacgtttgccgaagtagccgatgagttcatggactatattcgcggcgcggagttggtgatccataacgcagcgttcgatatcggctttatggactacgagtttagcttgcttaagcgcgatattccgaagaccaatactttctgtaaggtcaccgatagccttgcggtggcgaggaaaatgtttcccggtaagcgcaacagcctcgatgcgttatgtgctcgctacgaaatagataacagtaaacgaacgctgcacggggcattactcgatgcccagatccttgcggaagtttatctggcgatgaccggtggtcaaacgagcatggcttttgcgatggaaggagagacacaacagcaacaaggtgaagcaacaattcagcgcattgtacgtcaggcaagtaagttacgcgttgtttttgcgacagatgaagagattgcagctcatgaagcccgtctcgatctggtgcagaagaaaggcggaagttgcctctggcgagcataaatacctgtgaaaggcgctaaaaatagcgacttgggcgatttttgcagcaaacgattcaaaagatgagaaaaaccgttgacgaaggtcgaggcaatccgtaatattcgcctcgttcccaacggaacacaacgcggagcggtagttcagtcggttagaatacctgcctgtcacgcagggggtcgcgggttcgagtcccgtccgttccgccactattcactcatgaaaatgagttcagagagccgcaagatttttaattttgcggtttttttgtatttgaattccaccatttctctgttcaatgattttactctggcgtaggtgcgtgattctcgcttgttgtctcattcattaaaattcaataatgatatcgaaccattcagcttaaatatatttctagagaataaatttatattgattaaatgaatgtatatttcaaattgattttgtttgttattatttaagtgaggtatataattagagtccgttatcaatgctaaatattctaatcattatgacaggcgagggagtgtccaattatgaatagtaaaaagctttgttgcatatgtgtgttattcagcctgcttgcaggatgtgcctctgaatcttctattgatgaaaagaagaaaaaagctcaagtcacacaaagtaatattaataaaaacactccccagcaactgacagacaaagatttattcggtaatgaaaccactctggccgtatccgaagaggatattcaagctgcgcttgatggagatgagttccgcgttccccttaattctcctgtaatacttgttcaatccggcaaccgcgcaccggaaaccattatgcaggaggagatgcgaaaatattatactgtttccacattctctggtatcccggacaggcaaaagcctctgacttgtaacaaaaacaaagataaaaatgagaacgaggatgttgccagtgctgagaatatgaactggatgcaggcactgcgttttgtggctgcaaaaggacatcagaaagcgattattgtttaccaggatatgttgcagacaggaaaatatgactctgcgctgaaaagtacagtatggtccgactataaaaatgacaaactcactgacgctatctccctgcgctacctggtacgtttcacgctggtggatgtggcaacaggtgagtgggctacctggagcccggtgaattatgaatataaagtgcttccaccattgcccgacaagaatgaagccagtacgactgatatgacagagcagcaaatcatgcaacttaagcaaaagacctataaagcgatggtaaaagatttggttaaccgctatcaataataaattatatctgccgccaggaatttctggcggcaataatacaaaattctttgcataagaaatttttcttgacaaagacagtgcaagaaaggacatggaatccggagttaaaaactgtttgttttagaatatttaattatttaactgctgaatcttccttgcgagaaatatatccattattacatttcatgccatttttaatatagattgctcctgggaaaattcccgtattattaccgcaggggtgataattagtattgacatatcctgtgacaaaaggagctattaaaggtgctattacgatagctattagtaaaaatataagagttagctgtattgttatgtctgtggcgaaattgactaccttcgtttttttgattaagaatgattttattatcgtaagtaaaattacatgaatatttaaaaaggaaaacgacatgaaaccgaagcacagaatcaacattctccaatcataaaatatttccgtggagcattttattattgaatatagaggtttaactccggtaaaaaacaaagaagcattgaatgcagggaaaaataatatggccataaaaaacatcgaaagaaactcttttaatttaacatgtaaacgcatggttaatcctcatatcacgggtggagtgttaagaacatacataaatggagtcatgttttcccttttccatttatcaagttcctgttgccgttttagtccatctctaattgcatattttaatttttcacttaaatggcattgagcatcgatttcatttaaaacaactgtacacactatccctgtcagtaaaattgctcctccgacaagaattactggaaagccaaagctaacacaggcaaaagaagccagacttccaatagcggttgcaacaccaccggctataactgctttggccacatccatactaaaatcgccaagaaaattaaccagatctcgctcactactcataataaattctatggttctgctgatttaaccgcagagaagttcgccacagcaatccgaaaccactggcacgtggagaataagctgcacaggcgtctggacgtggtaatgaatgaagacgactacaaaataagaagaggaaacgcagcagaattatttagtgggatacggcacattgctattaatattttgacgaatgagaaggtattcaaggcagggttaagacgtaagatgcgaaaagcagccatggacagaaactacctggcgagtgtccttgcggggagcgggcttagctaataataccccgactctccccgtccttaaacacaacccccactcaccacaacctaaactcatccgcatcctgccatgccggaaacttttctctatattcccgcaatgctgccatgctcagctccgcatcaatgcgcgttgcctgatgcgcgtcggcagtagcgataatctctccttgcggattaatcacccggctgtcaccgcgataatggcagccgttgccatcgctgccgacgcgattgcatcccgccacatacgcctgattctcaatcgcgcgggccgtcagcaatgcctgccagtgcagagagcgcggagcaggccagttggcgacgtacagggcgaggtcataatcgttgagattgcggctccacacaggaaaacgtaagtcgtagcacaccagcggcaaaatacgccagccgcgccattccacaatcactcgcgcattgcccgctttataatgtagatgctcatctgccatgcggaacagatgacgcttatcataaaaatgtaccgtgccgcccggctcaaccagcaaaaagcggttaacgctaccagactccgtttgtaatgcaacactgcctgcaatcagcgcattgcactgctgcgccttagctgtcatccagttcactacgtcatcttgtgctaggctgctagctgccgcttccatggcaaagccgctggtaaacatctccggtagaacgatcacatcgcgcccggtaataccttccagttgacgatcaaaatgacgcaggttggcaggaccatccatccacaccagtggttgctgcaaaagcgtaatcttcaaaccaggcacggtgtacaactcctttatgcgaagggttttataactttaacaccttatcaggcagttgccttagcgcagaataaattgataacaaatgctgatattggaaatatctgatttgcaaattatcgtgttatcgccaggctttaggaggttaataacatgggcaggataagcagcggaggaatgatgtttaaggcaataacgacagtcgccgctctggtcatcgccaccagtgcaatggcgcaggatgatttaaccattagcagccttgcaaagggcgaaaccaccaaagctgcatttaatcagatggtacaagggcataagctgcctgcctgggtgatgaaaggcggtacttatactcccgcacaaaccgtaacgttgggagatgagacgtatcaggtgatgagcgcgtgcaaaccgcatgactgtggcagccaacgtatcgctgtgatgtggtccgagaaatctaatcagatgacggggctgttcagcactattgatgagaaaacgagccaagagaaactcacctggctgaatgtgaacgatgcgcttagcattgatggtaaaacggtgttgttcgcggcgttgaccggcagcctggaaaaccatccggatggctttaattttaaataattagcggataaagaaacggagcctttcggctccgttattcatttacgcggcttcaactttccgcactttctccggcaactttaccggcttcgtcgccagctcttccggatcaaagtcatcaacgttaatactgcgcagacggctttcttcagctttcaccagaatagcggcttcatctttatcaatcagccccttcaccagcgcgttgtgcgccagttcatccagacgggtaaacggcaggtttttacccagctctttacagatccgctgatgaattgggtcggcggcaatcacatccaccagcgcctcttccagcaagccaaccggattatgctcgctcggcgtcaggtactgaccgcgaccaatgcgggaacgggtggcgttcggcacttgtaaaatcttcgccactttatgatccagcttgtcagaaggtgccagataatgacgtccggtcgggaagatcaccacattcagcagcccggcaaccacgcggttcgggaagttttgcagtaaatcatccatcgcctgttcagcctgatacagcgcatcttgtacgccccagtgcaccagcggcaggtcggcttcattacggccttcgtcgtcataacgcttcagcacggcagaggcgaggtagagctggcttaaaatatcccccagacgggcgctgatgcgctcgcgacgtttcaggctgccgcccagcactgccatgctgacatcagaaagcagggcgaggttggcgctcaggcggttcaggtgctgatagtagcgtttagtggcatcgccggttggcgtgctgctggttaaaccgcgcgtcaggcccagccagaagctgcgaactttgttgctaccgacgtgaccgatatgtttgaacaacagtttatcgaacgcgttgacgtcattgttcttcgccgcttccatctcttccagcacgtacggatggcaacgaatcgctccttgtccgaagatcatcatgctgcgggtcagaatgttagccccttcaacggtgatggcaatcggtgcgccctggtaagcacgcgccaggaagttgctttgcccgagcataatgcctttaccgccggtaatatccatcgcatcaataatgttctgctgcccgcggtgggtacagtgatacttaacgatagcgctcagcacggcaggtttttcgccgagcataatgccgtaggtaatcaggcttgccgcagcatccatcacgtaggcattaccggcaatacgcgccagcggctcttcaatcccttccatcttaccaatagagattttgaactgacggcgaatgtgagcatacgcgccggttgccagcgctacgcttttcacgccgccggtactgttggaaggcagggtgatgccgcggcctacgctgaggcactccaccagcatccgccagccttgcccggccattttcggcccgccgatgatgtaatcgatcggcacgaagacatctttaccgcgcgtcggtccgttctggaacggtacgttcagcgggaagtggcgacgaccaatttccacgcccggcgtggtggttgggatcagcgcacaggtaatgcctaaatcttctgcaccgccgagtaatttttccgggtcggagagtttaaacgccagcccaagcacggtcgcaatcggtgccagcgtaatgtagcgtttgttccaggtcagacgcatccccagcacctgctggccctgccattcgcccatgcagacaatcccggtgtccggaatcgcgcccgcatcggaacccgcttccgggctggtcagtgcaaagcaggggatctcctgaccacgcgccagacgcggcagatagtgatctttctgctcgtcagtgccgtaatgttgcaacagttcgcccgggcctaaactgtttggcacgccgacggtaatcgccaggatcccgctcacgccggagagtttttgcagcacgcgagactgggcataagcgctgaactccagcccgccgtactcttttttgatgatcatcgcgaagaaacgatgctctttaaggtacgcccacaactccggcggcagatccgccagctcatgggtgatctggaaatcattcgccatccggcaggcttcttctaccgggccgtcgagaaacgcttgctcttcggcggtcaggcgcggctgcggatagttatgcagctttttccagtccggcttgccctggaacaagtcgccctcccaccaggtggtgcccgcatcaatcgcttctttctcagtgcggctcatcggcggcatcaccttacggaaaccgcgaaataccggcgcggaaatcatgctcttacgcataggcgcaaagttaaatggcacgaggataatggccagaggcaccagtacccacgcgctccacagaccagcaacgccgagggcggctgtccaggcgagcaaaatcagactgctgataaataagctcacgcggtgatagaacaacgcgccgagcaggacaaccgtagcgagaatactcaaaatcatcataacgaaaagccccttacttgtaggaggtctgaccacttgtgatgatatggttgtagtggatgtaaaaacatttagcaatatgtttacaatataattacaacaaagctcacattgttgctgtttttatccgcacttcaggtcaaaaagtcctggtcatagcacctgcccgtacttctcgcttttggcggtatccggtacactgcattttgtctattacatttatgctgaaggatatcctcatgtaccaggatcttattcgtaacgaactgaacgaagcggcggaaacgctggctaactttttaaaagatgacgccaatattcacgccattcagcgcgcggcggtcctgttagcagacagctttaaagccggtggcaaagtgctttcctgcggcaacggcggttcccattgcgacgctatgcactttgccgaagagttgaccggtcgctaccgtgaaaaccgtccgggctacccggcgattgctatttctgacgttagtcatatttcctgcgtcggtaatgatttcggtttcaatgatattttctcccgctacgttgaagcggtaggtcgcgaaggcgatgtactgctggggatctccacctccggtaactctgcaaacgtgatcaaagcgatcgcagcggcgcgtgagaagggaatgaaagtgatcaccctgaccggtaaagacggcggcaaaatggctggcacggcggatatcgaaattcgcgtaccgcactttggttatgccgaccgcattcaggagattcacattaaagtgatccatatcctgatccagttgattgaaaaagagatggttaagtaagtctggcgtaggccggataagacgtttacgccgcatccggcatttgtgcgctgatgcctgatgcgacgctgacgcgtcttatcatgcctacaaatctgtacgcgaaccgtaggccgaataatgcgttcacgccgcatccgacctgaaaattcttaaatcaatcttcgccgggggccatgcgctcccgctgttgtggaggttacccatgtgcgaattgctcgggatgagcgccaacgtccctaccgatatctgctttagtttcaccgggcttgtacagcgtggtggtggaaccgggccacataaagatggctggggcattaccttttacgaaggtaaaggctgtcgcacatttaaagatccacaacccagctttaattcccccatcgccaaacttgtccaggactacccgataaaatcctgtagcgtggtggctcatattcgccaggctaatcggggcgaggtggcgctggaaaatactcacccatttacccgcgagttatgggggcgtaactggacttatgcccataacggacaactgacgggctacaaaagtctggaaaccggcaacttccgcccggtaggcgaaaccgacagcgaaaaagccttctgctggctcctgcataaattaacgcagcgttacccgcgcacaccgggcaacatggcggcggtatttaaatatatcgccagtctggcggatgaactgcggcagaagggcgttttcaacatgctgcttagcgacgggcgctatgtaatggcgtattgcagcactaatttacactggatcacccgccgcgcgccgtttggcgtggcaacgttgctggatcaggatgtggaaatcgacttcagcagccagaccacaccgaatgatgtggtcacggtgattgcaacacagccgctgacgggcaatgaaacctggcaaaagattatgccaggcgaatggcgcttattttgcctcggggagcgtgtagtttgattattttgcctcggggagcgtgtagttacttgccagttgtggctgcacaacttcgtggcttaacggcttgctgaccacgtaacgaccattgaccacagaaacggttggtggcttacgggtttgctcaaagtagtcgtaacccggcttcagttgctcccagaagtccttaaagttggaatatttatggcgcttcatattggcgtcggtcatgcggaacgggtaaatactcacttgcacgctcggctgaccaaacaccagcgcaccagtaacgaactggaatatctcatcaataccctgattggtcattgcgtagcagccgatggaaacacaatcgccgtggatcatcaggtatttcccttcataaccatgcgcacggtcataggcattggggaaaccaatattaatcgctttgtagtaacggctgtctggttttaactgattacgctggacgctataaaacccttccgggcttttgaaatcgccctgacgctgttttggccctaagccgccggaatatttacagattttatagctgtcgagcagttgatattgctcgcccattttgacgtagagatcgagcgtacgttcttccttgaagatctggatgtagacaggggatcccatcaactgctgcttatactctttgctcacaggcgtggtagagctactgctgcccagcaaaccggcaaaactaacgcacgggatcaacaacatcgcaagaattaatgcgattttacgcatactgcttattccttgataaaacggttacacacgccaggacggcaaaatggatcccaaatcggaatagtctggatttggaaggctcacattatcaccaaaagagttttacgcaagcctgtcggcgcagggtttacaaatttcatcggaagcgggctttacccaaagagcgccgcgtgagttccagttctctcaaatcgtaaaagtttatcggtaagtttgtaaatcaggatccagtccggttcgacatgagcatcgcgataacctttccaactaccttgcagcgggtggtctttataaacagctggaagcggtaaagtattattgataagaagcgtcataagatatttcaatttattcatatccttatgacgcttttgtgcaagttttacatccttactatattgtccgctgtattcaatatccctttgaatcatatttaaattcctaatttatcaaataaatcatcggcgtctttggccttatgaacatcaatgccagcttcgctgtttttgatactttgaatggttaattgattaggctcgcgtaaatcaaacggcaatgccttttcacgcgcgacctttgtgagggttatgcgaaccaggtcagagatggtcagccccatcccggccagtacgtccgctgcctgattcttcagatcttcatcgattcgggcgcgaacaaacgcgttagcagccattggggtatctcctgtgctgtatatttattcagcttgaattgtagctcaaatgagcaacagcgacaatccatgagtaatttaataaacggatgtttttacataattaactgaaatatatatgttaattttataataatggtttattaagtttgttcagaaacgatccgggatacactgcaacattaaagcatgaccagccattattgagtatgtccttgccgagcattccatcctttgtattgagcggattactgttgatttgtttgccgttttctagttttgccagcgccaccacaagtcatatctctttcagctacgccgcccgccagcggatgcaaaaccgtgcgcgtttattaaaacagtaccaaactcatctgaaaaagcaggccagctatattgtggaaggcaatgccgaaagcaaaagggcgctacgccagcacaaccgggagcagataaaacagcatccagaatggtttcctgctccgctcaaggcgagtgacagacgctggcaggcgctggcggaaaacaaccactttttaagcagcgaccatctgcataacattaccgaagtggcgattcaccgcctggagcagcagcttggcaagccttacgtctggggcggtacgcggcctgataaaggctttgactgtagcgggttggttttttatgcctacaacaagatccttgaggctaagctcccgcgcacggccaatgagatgtaccactatcgccgggcaacgattgtggcgaacaacgacctgcgccggggagatttgctgtttttccatatccacagccgcgagatagccgatcatatgggcgtgtatttgggcgatgggcaatttatcgagagcccacgtaccggcgaaaccattcggataagccgattagccgaacctttctggcaggaccattttttgggcgcgcgcaggattttgacggaagagacgattttgtaagacggataaggcgtttacgccgcatccggcagttgtacgcaggtgcctgatgcgacgctggcgcgtcttatcatgcctacgagcccgcgaatatttgcgagccgctttcccgatataaaacaacctcattgccaacctttccttttcttcttaccgttgagaaaaaggagtcgccatgtctgaatatcgtcgttattacatcaaggggggaacatggtttttcacggtgaatttacgaaatcgtcgaagccaacttttgaccacccagtaccagatgctccgtcacgccattattaaagttaagcgagacaggccttttgaaatcaacgcctgggtcgttttgccagagcatatgcactgtatctggacattacctgaaggcgatgatgatttttccagccgctggcgggaaattaaaaagcaatttacccatgcttgtggattgaaaaatatctggcaaccacgtttttgggagcacgccatccgcaataccaaagattataggcatcatgttgattatatttatataaatccagtaaagcatggttgggtaaagcaagtgagtgattggccattcagtacgttccatcgcgatgtcgcgcgagggttatatcccatcgattgggcgggggacgtaacggattttagtgccggggagcgtatcattagttaattgtgcgcagatgcctgatgcgacgctagcgcgtcttatcatgcctacaaacttgtgccggatcggtaggccggataaggcgtttatgccgcatccggcagttatgcgcagatgcctgatgcgacgctggcgcgtcttatcatgcctacaaacttgtgcctgaacggtaggacggataaggcgttcacgccgcatccggcagttgtgcaccaatgctggatacttacatcaacgcccccataatcttcaactccagctcatccggcacttcgttatacgacagcacatgcagccccggcgcaaacaaccttgcataacgcgccagcaaagggcgcagctgcggtggcaccagcagcaccgggtctttccccgccgctttcatctgctctttcacctgtggcatcgtactctggaactggttgagcatattcggatcgaccggcacgctgtcgagcatcactttcccgccctgttgcgcctgattcaccacgttggtcagcagattttccagctcattattcagcgtatacaccgtcagctcctgcttgcgaacgaacggatgggtaatgctgcgccgcaatgccaggcgcacatcggccgccagcagaatatgatctttcgtcaccgtgctactggcgaccagcacggtggcgatggtgacgatatcgcgcagggaaacgccttcggtcagcagcgcccggtacactttcagcaactggctgtaattgagcgccgcgctcaaatcttccgccagacgcggtgccgtcgacgataaacggttatgcaactgcgtaatatcatcatagttaaacaaatcaggaatatagctgcgcacaatcttatttacatgggtagcgatcacgctggcgctgtcgatcacctgataccccatattcagcgccttcgctttctgcgccgcctggatccaggtgaccggcatcccgtacgccgggtcgttcccctgcacgccgtcaatctcgccgtaggtttcgctggagggcagggccatcagtttatccgccggaatatccgcttcatcagcctttatgccgttgatgaaaatggcgtactgactgggcttaaggcggaagttttcccgaatgcggatctccggcagcagcacgccgttgccgtcagaaatcacctgccgcacgccgcgaatccgctgggtgagcgggttaccctgtgctttgtccaccagcgccaccagtttgtaaccgaggcttaaactgataggctcgatcagcggaatggtttcccaactgacctgctgctcgctggtttcggtgatggtgcgggtcagcgtttcgaggcttttctcttccgcctccgccgccagcggctgtttgctcatccgccagccggtaaaaccaagcagggcgctgaacagcaaaaacggcaggtgcggcattcccggtaccaccgccagcacgaacataatcccggtggcggtgtagagcaccgacgggcttgccagcagctggttacgcacgtcatgggcgatatcgccgttgtcgctgacgcgggtgacgataatcgccgccgcggtggagagcagcagggaagggatctgcgccaccaggccgtcgccgatggtcatcagcacatactgctggaaggcagcatcggcgctcaggttgtatttgaagatcccgatacagacgccgccgatcaggttgatcgccagaatcatcatcccggcgatggcgtccccgcgcacaaacttcgatgccccgtccatcgcgccgtagaaatcggcctcgctggcaacatctttacgccgggtttgcgcctgcgcctggttgatcaatccggcgttaagatcggcgtcaatcgccatctgtttgccgggcatcgcgtctaaggtaaagcgggcagaaacctcggaaatacgctcggcccctttggtgacgacaataaagttgattgtcaacagcgtcagtaaatccgagcgtgaaagcattatcgccgcgctgcacgggcagtcgatttttaacggtggtgggctgtcgccgttaaataaaatcagcccgtctcatccgccaaaacctgccaccgtggcggtgccggaagagacggagaaaaaagcgcgtgatgtgaatgagaaaacggcgctgctgaagaagaaatccgccaccgagcttggtgagctggcaaccagtatcaacaccattgcccgtgatgcgcatatggaagcgaatctggagatggagattgttccccagggattacgcgtgctgattaaagacgaccagaaccgcgatatgtttgaacgcggcagcgcgaagattatgccgttctttaaaacgctgctggtggagctcgcgccagtgttcgactcgctcgataataaaattattattaccgggcataccgatgcgatggcctacaaaaacaatatctacaacaactggaacctttcgggtgaccgcgcgctttcggctcgtcgggtgctggaagaggccggaatgccggaagataaagtgatgcaggtaagcgcaatggcggaccagatgctgctggattccaaaaatccgcaaagcgcgggcaaccggcgcattgagattatggtgctgaccaaaagtgcgtccgatacgctgtatcaatactttggtcagcatggggataaagtggtgcagccgctggtgcaaaagctggataagcagcaggtgctttcgcagcgaacgcgttaaatgctgaatctttacgcatttctcaaaccctgaaatcactgtatactttaccagtgttgagaggtgagcaatgcgtaaaatcattcatgtggatatggactgctttttcgccgcagtggagatgcgcgacaatcccgccctgcgcgatatccctattgctattggcggcagccgcgaacgtcgggggggtgatcagcaccgccaattatcccgcgcgtaaatttggcgtacgtagcgctatgccgacagggatggcgctcaaattatgcccacatctcaccttgcttccggggcgctttgacgcctacaaagaagccagtaatcatatccgtgaaatcttcagccgctacaccagccgcattgaaccgttgagtctggatgaggcttatctcgatgtcaccgatagcgtccattgccacggttctgcgaccctcatcgcccaggaaatccgccagacaatcttcaacgagctgcaactgacggcgtctgcgggcgtggcaccagtaaagtttctcgccaaaatcgcctccgacatgaataaacccaacggccagtttgtgattacgccggcagaagttccggcatttttacaaaccttaccgctggcaaaaatccccggcgtcggcaaagtcagtgcggcaaaactggaagcgatggggctgcggacctgcggtgatgtacaaaagtgtgatctggtgatgctgcttaaacgctttggcaaatttggccgcattttgtgggagcgtagtcaggggattgacgaacgcgatgttaacagcgaacggttgcgaaaatccgtcggcgtggaacgcacgatggcggaagatattcatcactggtctgaatgtgaagcgattatcgagcggctgtatccggaacttgaacgccgtctggcaaaggtaaaacctgatttactgattgctcgccagggggtgaaattaaagttcgacgattttcagcaaaccacccaggagcacgtctggccgcggctgaataaagctgatctaatcgccaccgcgcgtaaaacctgggatgaacgccgcggcgggcgcggtgtgcgtctggtggggctgcatgtgacgttgcttgacccgcaaatggaaagacaactggtgctgggattatgatgtatactattatgtatattctggtgtgcattattatgagggtatcactgtatgcatcgaattctcgctgaaaaaagcgtcaatatcactgagttacgtaaaaacccagctaaatactttattgatcaaccggttgcggttctttctaataatcgccccgcaggatatctcttaagtgccagcgcattcgaagcgttaatggacatgcttgctgaacaagaggagaaaaagcccataaaggcgcgcttccgtccaagtgctgcaagattagaggaaattacacgccgcgctgaacaatatcttaatgatatgacggatgatgatttcaatgactttaaggaataaggatgcgggtattcaaaacaaaacttattcgcctgcaacttacagcagaggaacttgatgcgttaacggcggattttatttcctataagcgtgacggtgttttgccagatatatttggtcgcgatgcactctacgacgactcctttacctggccattaatcaaatttgagcgagttgctcatattcatctggcaaatgagaataatccatttccgccacagttgcgccaattcagcagaacgaatgacgaagcgcatttggtatattgtcagggggcgtttgatgagcaagcatggttgctcattgccattctgaaacctgaacctcataaactggctcgagataacaaccaaatgcataaaattgggaaaatggcagaagcgtttcgcatgcgtttttgaatttatattatgaataacatacaaataagaaactatcagcctggcgattttcagcaactatgcgctattttcattagagcggttacgatgaccgccagtcagcattatagtccacaacaaatttccgcctgggcgcagattgacgaatctcgctggaaggagaaactcgcgaaaagtcaagtgtgggttgcgatcattaatgcacaaccggttggttttatttcccgcattgaacattatatcgatatgttatttgttgaccctgaatacacccgccgtggggttgccagcgctttgttaaaacctttgattaagtctgaatccgaacttacggtggacgcaagcataaccgcaaaacccttttttgaacgttatggttttcagacagttaagcagcagcgcgttgaatgccggggagcgtggtttactaatttttatatgcgatataaaccgcaacattaaatccagcttgcaatgaaaataacgcccgcctggtatgtgcgcgttttctgattccacaaactgcaaggaggtaaatcatgacaaatcctttatcaatgactctttgcagacctttccaggattaattctttttttcttgccctggattcgtctgccatttcctgatttttatatttatatactctaaataattcgagttgcaggaaggcgacaagcgagtgaatcgccaggagcttacataagtaagtgactggggtgaacgaacgcagtcgcagtacatgcaacttgaagtatgacgagtataaatggaatggtacatgggcaaatatattcgtcccttatccgatgcggtatttaccatcgcatctgatgacctgtggatcgagagtttagcgatccaacaattacacaccacggcaaatttacccaacatgcagcgcgtagtggggatgccagatttacaccccggacgcggctacccgattggcgcagcgttcttctctgttggtcgtttttacccggcaagacgtcgcggtaacggtgctggaaacagaaacgggccgctactctgacacactgcgtagcgcgctggtttctctcgatggcgataacgcatgggcattaagcgaaagctggtgtggcactattcagtggatttgtccgagtccgtatcggcctcatcatgggcgcaaaaactggtttctgggcattgggcgttttaccgctgatgagcaggaacaaagcgatgcaatccgttatgagacgctgcgtagcagcgggccgggcggtcaacatgtcaataaaaccgacagcgcggtacgcgccacgcatttggcatccggtattagcgtgaaggttcagagtgagcgtagtcagcatgctaacaagcggctggcacgattgctgattgcctggaagctggagcaacagcaacaggaaaatagcgcggcgctgaaaagccagcggcgaatgttccatcaccagattgaacgtggcaacccgcgacggacatttacagggatggcttttatcgaaggataatgaaggatgaaactgccggaaggcgattaaacgccatccggcagcaaatcaaataattacttcgccggaatttctttcagcagttcagtcagcagtgtccagtaatgacctacgctttcgatgtgaacttgctcatccggagagtgtggaccggtgatagttggcccgatagaaaccatgtccatttccggatacggttttttgaacagaccacattccaggcccgcgtggataatctggatgttcggcgtcttgttgaacaggcgctgataggtttcacgtaccagatgcatcaccggagaattagcgtccggctgccagccaggatatgcgcctttcgcttcggttttcgcgccagccagtttacccaggctatccagcatgctcaccacgtagtctttaccgctgtcgatcagactacggatcaggcagtgaatttctacgttattgtcagtcatggtcaccacaccgacgttcagggaggtttcaaccacacctttggctacatcggagttacgaatcacaccgttcggggtggcgttcagcagacgaataaaggtatcgcgagatttcgcaatcagggcagctttatcgttcgctacagagtccagcaacaaggccagatttttctctttttctgccagctcgtttttcaggatctcctgataggtattcaccagagatttcaggacgtcgactttatcagctgcgacagcaatggtcgcaaaggcttcacgcgggatggcgttacgcagtgtgccgccgttgaaatcgataaggcgcagatccagttcttccgcatgacccgccaggaagcgcaccagcagtttgttggcattacccagcccaacgtggatttccccgccggagtgaccgcctttcagaccttttaaggttaacttgaaggtttcaaaaccagctggaaccgcttcacgatctaaatgcaggttggaggtgaagtcgataccccccgcacaacccatgtagatttcaccttcttcttcggagtcggtgttaatcagaatatcagcctgcaaccagttgccctgtaagccgaacgcaccgtccataccggcttcttcggtcatggtcagcagcacttccagcgggccgtgaaccacgttttcgtcagccagaaccgccagcgcagaggccataccaatgccgttatccgcacccagcgtggtgccgcgcgctttaacccattcgccatcaatataaggctggataggatctttcgtgaagtcatgcacggtgtcgttatttttctgcggcaccatatcgaggtgggcctgtaagacgaccggtttacgattttccatacctgcggtagcaggtttacgaatcaggatattacctacctgatcgcgttcgacatggaaacctttctcttttgcccaaccaacaatgtattcagcgagttgctcttcatgataggacgggtgaggaatagaacagattttggcaaaaatatcccacagcggctgtggagataattgagacagttcagacacgttaagtctccttgtcgatcacccgcaaaacagtattgcaggtcacagggttagcagaaaatgttgtcaacacaagacaggcttgcgagatatgtttgagaataccactttatcccgcgtcagggagaggcagtgcgtaaaaagacgcggactcatgtgaaatactggtttttagtgcgccagatctctataatctcgcgcaacctattttcccctcgaacactttttaagccgtagataaacaggctgggacacttcacatgagcgaaaaatacatcgtcacctgggacatgttgcagatccatgcacgtaaactcgcaagccgactgatgccttctgaacaatggaaaggcattattgccgtaagccgtggcggtctggtaccgggtgcgttactggcgcgtgaactgggtattcgtcatgtcgataccgtttgtatttccagctacgatcacgacaaccagcgcgagcttaaagtgctgaaacgcgcagaaggcgatggcgaaggcttcatcgttattgatgacctggtggataccggtggtactgcggttgcgattcgtgaaatgtatccaaaagcgcactttgtcaccatcttcgcaaaaccggctggtcgtccgctggttgatgactatgttgttgatatcccgcaagatacctggattgaacagccgtgggatatgggcgtcgtattcgtcccgccaatctccggtcgctaatcttttcaacgcctggcactgccgggcgttgttctttttaacttcaggcgggttacaatagtttccagtaagtattctggaggctgcatccatgacacaggcaaacctgagcgaaaccctgttcaaaccccgctttaaacatcctgaaaccagcacgctagtccgccgctttaatcacggcgcacaaccgcctgtgcagagcgcccttgatggtaaaaccatccctcactggtatcgcatgattaaccgtctgatgtggatctggcgcggcattgacccacgcgaaatcctcgacgtccaggcacgtattgtgatgagcgatgccgaacgtaccgacgatgatttatacgatacggtgattggctaccgtggcggcaactggatttatgagtgggccacccaggcgatggtgtggcaacaaaaagcctgtgcggaagacgatccgcaactcagtggtcgtcactggctgcatgcggctacgttgtacaacattgccgcctatcctcatctgaaaggagatgacctggccgagcaagcgcaggctttgagtaaccgcgcctatgaagaggccgctcagcgtctaccgggcacgatgcggcagatggagtttaccgtacccggcggtgcgcccatcaccggctttttgcatatgccgaaaggcgatggcccgttcccgacggtattaatgtgtggtggtctggatgcgatgcagacggactattacagcctgtatgaacgttattttgcgccgcgcggcattgcgatgctgactattgatatgccgagcgtgggcttttctagtaaatggaagctcacccaggactccagcctgttgcatcagcacgtcttaaaggcgctgcctaacgtaccgtgggtggatcacactcgcgtcgcggcctttggtttccgtttcggcgctaacgttgccgtgcgtctggcataccttgaaagcccgcgtctgaaagcggttgcctgtcttggtccggtagttcataccctgttgagtgattttaagtgccagcaacaggtgccggaaatgtatcttgacgttctggccagtcgtttggggatgcatgatgcttccgatgaagcgttgcgcgtggagctgaatcgctatagtttaaaagtgcaaggattgctgggacgtcgctgcccaacgccaatgttaagtggctactggaagaacgatccgttcagcccggaagaggacagtcgcttaatcaccagtagttctgctgacggtaaattattagagatcccatttaacccggtgtatcggaattttgacaaaggtcttcaggaaatcaccgactggatcgaaaaacgcttgtgttaaaaatttgctaaattttgccaatctggtaaaacagttgcatcacaacaggagatagcaatgacgttaccgagtggacacccgaagagcagattgatcaaaaaatttaccgcactaggcccgtatattcgtgaaggtaagtgcaaagataatcgattctttttcgattgtctggctgtatgcgtcaacgtgaaaccggcaccggaagtgcgtgaattctggggctggtggatggagctggaagcgcaggaatcccgttttacctacagttaccagtttggtctgttcgataaagcaggcgactggaagagtgttccggtaaaagacactgaagtggttgaacgactggagcacaccctgcgtgagtttcacgagaagctgcgtgaactgctgacgacgctgaatctgaagctggaaccggcggatgattttcgtgacgagccggtgaagttaacggcgtgagtgaaatgtgccggatgcatcacatccggcaatattcattaaaactgatacgtcatgccaaccgcgacaatatcatcattattaatattcaatttgttatcgctatccagttggttgattttataatcaacaaacgcactcatatttttgttgaaataatacgtagcaccgacgtcgatataattgaccagatcttcatcaccgataccttcaatatctttccctttgcttaagacataacccaggcttggacgcagaccaaagtcaaactggtattgagcgaccgcttcaaagttctgtgtcttattggcaaagccgccagttattggcgtcattttgcgtgtttcagaatagaaagttgccagataaatattattggcatcgtatttcagacctgttgcccatgcttctgcacgcttgcctgtgccacggctttgcaggttctgctcgttggtgcgatcactgttggtataggccccactaatggcgaaatcgctgccgccaaagtcatatgtcaaactcgtgccgaagccatcgccgttttgctttttaacgtcgcggttttcgtttttcccttgatattgcagggttaagttcaggccatcgataacgccgaagaagtcggtgttccgatacgtcgccagaccgctggcgcgtttggtcataaagttgtcggtctgcgcgctggaatcgccaccaaattccgggaacatatcggtccaggcttccacgtcatacaacgcccccaggttacgaccataatcgaaagaacccaaatctttatatttcaacccggcaaaagcgagacgcgttttttgctgtgcagtatcactctctgctttattaccggcaaactctgcttcccaacgaccataaccagtcagttgatcgttaatttgtgtttcgcctttgaaaccaaaacggatataactctggtcgccatctttactggcgttatcactcatataatgcatggctttaactttgccatagacatccagtttattaccgtctttattatatatttctgcagcctgtacagatgcagatgccacaatgcccatcaccactaatgccagagtgctctttttcattttcattcctgattttaattaacgcgcgaatattcagcgggagagtcccgttgaaaacaggaaagtttttaacctgagattgttaaagatatattacagattaataatattcttaaaatgtggtaatttattaaatctgtaataaaagcgtaaacaactgccgctaggcttgctgatcccgcgcaacaaaacgccatgctttgctcgcagatggttggcaaccgacgacagtcctgctaaaacgttcgtttgatatcatttttcctaaaattgaatggcagagaatcatgagtgacagccagacgctggtggtaaaactcggcaccagtgtgctaacaggcggaagccgccgtctgaaccgtgcccatatcgttgaacttgttcgccagtgcgcgcagttacatgccgccgggcatcggattgttattgtgacgagcggcgcgatcgccgccggacgtgagcacctgggttacccggaactgccagcgaccatcgccagcaaacaactgctggcggcggtagggcagagtcgactgattcaactgtgggaacagctgtttagcatttatggcattcacgtcgggcaaatgctgctgacccgtgctgatatggaagaccgtgaacgcttcctgaacgcccgcgacaccctgcgagcgttgctcgataacaatatcgttccggtaatcaatgagaacgatgctgtcgctacggcagagattaaggtcggcgataacgataacctttctgcgctggcggcgattcttgcgggtgccgataaactgttgctgctgaccgatcaaaaaggtttgtataccgctgacccgcgcagcaatccgcaggcagaactgattaaagatgtttacggcattgatgacgcactgcgcgcgattgccggtgacagcgttagtggcctcggaactggcggcatgagtaccaaattgcaggccgctgacgtggcttgccgtgcgggtatcgacaccattattgccgcgggcagcaagccgggcgttattggtgatgtgatggaaggcatttccgtcggtacgctgttccatgcccaggcgactccgcttgaaaaccgtaaacgctggattttcggtgcgccgccggcgggtgaaatcacggtagatgaaggggcaactgccgccattctggaacgcggcagctccctgttgccgaaaggcattaaaagcgtgactggcaatttcagccgtggtgaagtcatccgcatttgcaacctcgaaggccgcgatatcgcccacggcgtcagtcgttacaacagcgatgcattacgccgtattgccggacaccacagccaagaaattgatgcaatactgggatatgaatacggcccggttgccgttcaccgtgatgacatgattacccgttaaggagcaggctgatgctggaacaaatgggcattgccgcgaagcaagccagctataaattagcgcaactctccagccgcgaaaaaaatcgcgtgctggaaaaaatcgccgatgaactggaagcacaaagcgaaatcatcctcaacgctaacgcccaggatgttgctgacgcgcgagccaatggccttagcgaagcgatgcttgaccgtctggcactgacgcccgcacggctgaaaggcattgccgacgatgtacgtcaggtgtgcaacctcgccgatccggtggggcaggtaatcgatggcggcgtactggacagcggcctgcgtcttgagcgtcgtcgcgtaccgctgggggttattggcgtgatttatgaagcgcgcccgaacgtgacggttgatgtcgctagcctgtgcctgaaaaccggtaatgcggtgatcctgcgcggtggcaaagaaacgtgtcgcactaacgctgcaacggtggcggtgattcaggacgccctgaaatcctgcggcttaccggcgggtgccgtgcaggcgattgataatcctgaccgtgcgctggtcagtgaaatgctgcgtatggataaatacatcgacatgctgatcccgcgtggtggcgctggtttgcataaactgtgccgtgaacagagcacaatcccggtgatcacaggtggtataggcgtatgccatatttacgttgatgaaagtgtagagatcgctgaagcattaaaagtgatcgtcaacgcgaaaactcagcgtccgagcacatgtaatacggttgaaacgttgctggtgaataaaaacatcgccgatagcttcctgcccgcattaagcaaacaaatggcggaaagcggcgtgacattacacgcagatgcagctgcactggcgcagttgcaggcaggccctgcgaaggtggttgctgttaaagccgaagagtatgacgatgagtttctgagtttagatttgaacgtcaaaatcgtcagcgatcttgacgatgccatcgcccatattcgtgaacacggcacacaacactccgatgcgatcctgacccgcgatatgcgcaacgcccagcgttttgttaatgaagtggatagctccgctgtttacgttaacgcctctacgcgttttaccgacggcggccagtttggtctgggtgcggaagtggcggtaagcacacaaaaactccacgcgcgtggcccaatggggctggaagcactgaccacttacaagtggatcggcattggtgattacaccattcgtgcgtaaataaaaccgggtgatgcaaaagtagccatttgattcacaaggccattgacgcatcgcccggttagttttaaccttgtccaccgtgattcacgttcgtgaacatgtcctttcagggccgatatagctcagttggtagagcagcgcattcgtaatgcgaaggtcgtaggttcgactcctattatcggcaccattaaaatcaaattgttacgtaagatcttatcattctcccaccaaaaaattatcttaatgtaacagctggtgtaagtaaattctatcaacgaagatcaatcttatctactgaccaaaaaggcctgatagggcttcgctcactatacatccttggctgcaggtttagttgtacaccactcctaaatttaatgtgttggcaatgtgttcaataaagctcgaacaaattagctcattatgatcggttaatacttcaacttctggttgcatgattgtttgtccgtaaaaagataacgcgcctgccgggtagtagcaggcgcattacgcaataggtaaacaagggaggaagttcagaaatgtaaatcgggaaggttgtacgcaatgttcatcgtactacgttgttacggctttgccgcaacaagccagttgcctgccgcgctcgcagaatgtctgcagcccggagataaggagattgttcctgccagctaaatcccttcctgtcgatacgaaccagctcgtatttttctaccagaaaattcacggcatcggctagggtgataccggcatcgatagtctgtatcaggaatgttcgggttaaatatcagcaaaaagcccgcatcatgaatactggatatgaagcatgagagttacctcagtgtttatataaggattcggtccccctctctggaacggtaactctcaatctgatcggttcctgcgttagttcacatcacgactcattttttcgctctcaccggcatcccatttgccacaaaatatcccgccgtgctcctcggcagcgcttcctgtccacgaatcatatccgctattttctcgccaatcataattgtcgtggcgttcaaattcccggtgataatctgcggcataatgctcgcatccaccacacgcaggccttctaacccgtgtacgcggccttcgccgtcaaccacggacatctcgtcgtaacccattttgcaggtaccgcacggatggaaggcggtttcggcgtggttacgcacgaactcatcgagctgttcatccgtctggcattcgacaccggggctgatttcgcggccacgatactgatccagcgcgggttgatgcatgatctcgcgggtgatgcgaattgcgtcgcggaactcctgccagtcctgctcgtggctcatgtagttaaacagaatcgccggatgctggtgcgggtcgcgggatttaatccgcacatgcccacggcttgggctgcgcatactgccgacgtggcactggaaaccgtgctctttcactgcattgctgccgttatagttaatcgctactggcaggaaatggtactgaatattcggccacgcaaattcctcacggctgcgaataaatccacctgcttcaaagtggttgctggcaccaacgccagtgccgccaaacagccactccgcaccgattttcggctggttccaccactgcagggcagggtagagggaaaccggttctttgcactcatattgcagatacatctccagatgatcctgaagattttcgccgacgccgggtaattcatgcaccagcggaatatcaaactccgccagcagttcagcgttgccgacgccggagcgttgcaggatctgcggactggcaatcgcgcctgcacataacagcacttctttgttggccgttgcgcgggttgggatggtgctgtcgccttccagccattcgacgcccaccgcgcgtttgccgtcaaaaatgatgtgatcggtcatagcgtgagtacgaatggtcaggttaggacggcttttggcctgatcgagatagccacgcgcggtgctggcgcgacggccctgcggcgtgacggtgcgatccatcggaccaaaaccttcctgctgataaccgttgagatcgtccgtgcgcgggtagcccgcctgcacgcccgcttcaatcatcgcttcaaacagcggattgacgccgggtttggaggtagtgacgctcaccgggccatcaccgccgtgatagtcgttttcacccatatcgcgagtctcggccttgcggtagtagggcaggcagtcgaggtagctccagttctccagaccgggttcttgcgcccagttatcgagatccagcgcattgccacggatgtagcacatgccgttgatcaggctgcttccacccagacctttaccgcgtccgcactccatgcggcggttattcataaacggttcaggttccgtttcataggcccagttgtagcgtttaccctgtagcgggaatgccagggcagcgggcatctgggtgcggaagtcaaagcgatagtccgggccgcccgcttcaagcagcagcacggaggtattcggatcttcagtcagacgggtagcgagaacgttgccggcactgccggcaccaataatgatgtagtcaaattgcaaataaacctcctggttagaatatggactggaatttagccatctcaacctggatggacttcacctgggtgtaactctggagcgtcatcacgccgttctcgcgaccaatgccggagtgtttgtagccgccaacgggcatctctgccggggattcgccccaggtgttgatccagcaaatacccgcttccagctgatgaatgacgcgatgcgcgcggttcaggtccgctgtcacgatgcccgccgccaggccgtagtcggtatcgttagcgcggcgaatgacttcgtcttcgctctcgtaggtcagaatggacatcactggcccgaagatctcttcacgcacgatggtcatatcgtcgctgcaatcggtgaacactgtcggtgcaacccatgcgccgttatcgaagccatcgcctttcagtacatcgccgccgcacagtacgcgcgcgccttcctctttgcctttggcgatatagcgcagcacgttatcgcgatgcgggaagctgaccagcgggccgaagttagtttgcggatcgaaaacgtcgcccgcgcgaatgcgctcaacgcgcgccagaattttctgctcaaatgcggctttgcatttcgccggaacgaagacgcgggtgccattggtacacacctgaccggagctgaagaagtttgccatcatggcgatatcggcggcgagatcgagatccgcatcatcgaaaacgatcagcggacttttaccgcccagttccatggtcacttctttcagggaagaggccgcgctgttagccatcacttttttgccgctggcgacaccgccggtaaaactcactttggcaatgcccggatgctcggtcagatattgcccggtctccgcgcccacgcccggcaacacgttaaatacgccgtccggcaggcccgcttcgctgtaaatttcagccagctttaacgcggtaagcggggtaacttcgctcggtttgaaaatcattgcgttgcctgccgccagcgccggggcggatttccacagggcaatctggatcgggtagttccatgcgccaatccctgccactacgcccagcggttcgcggcgggtatacacaaaggacgtttcacgcaacgggatctggctgccttccagcgccgggatcagcccggcgtagtactccagcacgtccgcaccggtaacgatatcgacggtactggtttcgctatatgcttttccggtgtcgagggtttccagttttgcgagttcgtcattgcgttcacgcagaatatcaacggcccgacgcagaatacggctgcgctccatggcggtcatgctcgcccagattttttgcccctgctgggcgcttttcacggcgcgatcgacatcctcgcgcccggcggcctgcacggtcgccagcacgttaccgttggccgggttaatggtctcgaaggtgcgaccgctggtggcggaggtataaccaccatgtatataaagctgctgttctgccattcgggacatcacgtctcctcggttaatcggtgggtagatgctgagtgataaagtggcgggtcagggaattagcgcgggttttatccagcggtttgccgctcagagccgcgcgcagccataatccatcaatcagcgcggccaggccgtagcccgcttcctgtgcctgttcgcgcggcaattcgcgacgaaactcgctcaccagattgctcagcaagcggcggctgctgacctgctgtaaacgatagagcatcggctgatgcatactgctggcccagaacgccagccaggctttcatcgccgcactgctcacctgcgtttcatcgaagtttccgccaacaatcgcctgtaatcgctgctctgcactgccctgcggaagtgcatgtaatcgattcaaaaccgcgtcacgcagctgactggtgatatcgcgcatggttgcttccagcagaccatttttgtccctgaaatagtggctgatgatccccgtagaaacgcctgcacggcgggcgatctgcgcgatcgttgcatcgtgcatgcccacttcatttattgcttccagtgtggcgtcgatcagttgtctgcgccggatgctctgcatccccaatttgggcattttcgccactccattcatcagcggtgtttatctattaaagcggttattgattggacgttcaatataaaatgtgtcttaattgttacgaatttgattttaaatagtaacaataacagtggggatactggatgacagaccttagtcacagcagggaaaaggacaaaatcaatccggtggtgttttacacctccgccggactgattttgttgttttccctgacaacgatcctgtttcgcgacttcagcgccctgtggattggccgcacgctggactgggtttctaaaaccttcggttggtactatctgctggcggcaacgctctatattgtctttgtggtctgtatcgcttgtagccgttttggtagcgtgaagctcgggccagaacaatccaaaccggaattcagcctgctgagttgggcggcgatgctgtttgctgccgggatcggtatcgacctgatgttcttctccgtagccgaaccggtaacgcagtatatgcagccgccggaaggcgcgggacagacgattgaggccgcgcgtcaggcgatggtctggacgctgtttcactacggcttaaccggctggagcatgtatgcgctgatgggcatggcgctcggatactttagctatcgttataatttgccgctcaccatccgcagcgcgctgtacccgatcttcggtaaacggattaacgggccgataggtcacagtgtggatattgcagcggtgatcggcactatcttcggtattgccactacgctcggtatcggtgtggtgcagcttaactatggcttgagcgtactgtttgatattcccgatagcatggcggcgaaagcggcactgatcgccttgagcgtgataatcgccacgatctctgtcacctccggtgtcgataagggcattcgcgtgttaagcgagcttaatgtcgcgctggcgctgggattgatcctgttcgtattgtttatgggcgacactagcttcctgcttaatgcactggtgctgaatgttggcgactatgtgaatcgctttatgggcatgacgctcaacagttttgccttcgaccgtccggttgagtggatgaataactggacgctcttcttctgggcatggtgggtggcatggagcccgtttgtcggcttgttcctggcgcgtatcagccgtgggcgtaccattcgccagttcgtgctgggcacgttgattattccgtttaccttcacgctgttatggctcagcgtgttcggcaatagcgcgctgtatgaaatcatccacggcggcgcggcatttgccgaggaagcgatggtccatccggagcgcggcttctacagcctgctggcgcagtatccggcgtttacctttagcgcctccgtcgccaccattactggcctgctgttttatgtgaccagcgcggactccggggcgctggtgctggggaatttcaccagccagcttaaagatatcaacagcgacgcccccggctggctgcgcgtcttctggagcgtggcgattggcctgctgacgctcggcatgctgatgactaacgggatatccgcgctgcaaaacaccacggtgattatggggctgccgttcagctttgtgatcttcttcgtgatggcggggttgtataaatctctgaaggtagaagattaccgccgtgaaagtgccaaccgcgataccgcaccgcgaccgctggggcttcaggatcgcctgagctggaaaaaacgtctcagccgcctgatgaattatccgggcacgcgttacactaaacagatgatggagacggtctgttacccggcaatggaagaagtggcgcaggagttgcggttgcgcggcgcgtacgtggagctaaaaagcctgccaccggaagagggacagcagttgggtcatctggatttgttggtgcatatgggcgaagagcaaaactttgtctatcagatttggccgcagcaatatagcgtgccgggctttacctaccgcgcacgcagcggtaaaagcacctactaccggctggaaaccttcctgttagaaggcagccagggcaacgacctgatggactacagcaaagagcaggtgatcaccgatattcttgaccagtacgagcggcaccttaactttattcatctccatcgtgaagcgccgggccatagcgtgatgttcccggacgcgtgattgttattgcataaaaccgcgccatgtctgcatatggcgctgtttctcctacctcttgatacgttatatctatacggttaagcccttagtatctattgatgattaccagacaacagataataaaaaagaaaagaactattgcagcccaaaacctacatttgggctgttgcgaatgttcaataagtttagtcttatttaatgtaaatattgctgatcatttgaaatgacgcattattcatgagaaatgtgtatcgtaaatcaactgaaattaacgcaaccatttgttatttaaggtttaattatctgtgtgtgatattttattgaatgttttaaatattgtttttattggcattgctataatattggttatcatttgctgaatggattcagtcttaatgagtgggtttttaagggacaggcatagagtaatgatacgtatgcataaccaacatctttactcattatgtcattgaatgttgacgctatgtgtttatgagggagaggtattttcagttgatctggattgttaaattcatataatgcgcctttgctcatgaatggatgccagtatgtagtgggaaattataaatattgaaatagtccaactacttctttattaccaaaaatgagtatctgaattttaatattgcattcttgcgtgattatctcctgagtttgacttgtgattacctttttaaggtatttagcgtaactgtttttgagcgagcatcagaggtaaagataatcttcttgatagtgatgtgggatgttatacgtatggcatcgctgatgtttatggttaccccttatgtgtgctcaggaatcgacaggtaatcactcatactgaacagcgataaaagataaaggtgtgttcatgaatagttgtgattttcgtgtttttctgcaagagttcggtacaacggttcatttgagtttgcctggtagcgtatccgagaaagaacgactgctactcaagctgctgatgcagggaatgtctgtaacagaaataagtcagtacagaaatcgcagtgcaaagacaattagtcatcaaaagaaacagctctttgagaaactggggattcagagcgatattactttctggcgcgatattttctttcagtacaatccggagatcatatccgccacggggagtaatagtcacagatatattaatgataatcactatcaccatatcgtcacgcctgaagccatcagtctggcgttggaaaaccacgaattcaaaccgtggatccaaccggttttctgcgcgcagactggcgtactgacgggctgtgaggtgcttgtccgctgggaacatccacaaacgggaattatcccaccggatcagtttattcctctggcggagagttccggtcttattgtcataatgacccgccaactgatgaaacagactgcggatattctgatgccggtaaaacatttgctgccggacaatttccatattggcatcaacgtcagcgcgggttgttttttggcagcgggatttgaaaaagagtgtctgaacctggttaataaattaggtaacgataaaatcaagctggttctcgagctaacggaacgtaaccctattccggtaacgccagaagccagagcgatatttgacagccttcatcagcacaacattacctttgcgctggatgactttggtacgggttatgcgacctatcgttacttgcaggcgttcccggtcgattttattaagatcgataagagttttgtgcaaatggcgagtgtcgacgaaatctccggtcatattgtggacaatattgtcgaactagcgcgtaagcctggtctgagtatcgtggcggaaggggtagaaacccaggagcaggcggatttaatgatcggtaaaggcgttcactttttgcagggctatttgtactctccgccagtaccgggtaataaatttatctctgaatgggtaatgaaagcaggtggttgatgtaaaccgctattcacagcgcatcgggaggttggcagcgattaattctcccgatgcagtaaatcctgatagatccccgttaatatgccatttggcgcaaattgttttttaatccactgcgtcacctgacccgtagcagaatgctgagtcgccagtaacatgcggctatcctggcgcggattatggatttgtcgggtaaccagcagggattgcgtcatcgcctcacggaccatgtaatccggcaaaaaaccaattccttcacctaaaatctggcactgacatttggtgttgaaatctggcaccagaatactctcctgcccgtgcagcaaccagcccacttttttattaatcgtatgcgcggtgtcctccaccataatattagggtagagacgcagttggctttcggcgatgggttccggcacaaaggctaacgggtgatccggggcgatagcaaaagcccagcgaatcgcgccaatttcagtgtaatcaataccgccgccgtccagtagtgtatcgggtgcgccgatggcgatattggcctgattattaataatcgcatcccagacgccgttatacacttcggtggtgacggtaatctggcaggtaggaaactgctttttcagcacctgtaacaagcgtgcggtgtgtttgggcgtataaagcagctgattaatacaaatgcgcacacgcgcttctatgccctggctaatagtatcgattctgcgtttgatggcataaaaatcattcagcaggtcggtagctttgcggaaaaaataacgcccggactccgttaactcaatgctgcgggtactgcgagtgaacagcaccacatccagccccgtctccatacgcttaatggtgtagctaatggcggaagtggttaaacccaactcttctgcggctttactgaagctgccaaaacgcgcagcggtagtaaatgccaacagattctcttcggtaaaaatactgttcattaaaccattctcgccattatctactatgaatttctccagctatgactgtagaggtatcggttaaagatagataatcatttttgaataacttttaatacccgtcgcgtttagtcgtcgcttcgcttaatttttgtccaccatattcactaattacccccacgcagttacccgccagaaaacccagtaacgtcaccgtccagttcatcccgctggcaaaaaacagcgtcatgccgagaaagccaccgggaataaaggacagtaaccagaaacgcccttgccagaccactaccgcgctgaagggtacggtagtaattacgctcgcccagaacgcggacagtccacttacagaggccagccaaccagcagtcagcgcggcgaaaaacgcccacaccatcccggaataattaaccgccagacttctgataaacccgcttttaccgccgcctgcggcataaaaactgcaaaaggcgacgaagccaatggttcctaataattcccatccttgagagagcccgacatgactagacactaactgccaaagccctgcacaaataccgacggtgacacccgttgccgtgagtccgttcatcttgttcccctctggttagacatggacgaaagctactcttacatgtgcagactatagagaaataaaacctgattgagtgaaagggtatcgggtcaaagaaacaaatattgcactaccgcacactgcgaaaagattgttgaatattattcaacaaaaaggcgagatacggcgaattaaatttaagcgggttcttttatcagattatcgttgctattctcaattcatcgaaaacagccacaaaaaccaggggaatgtgaatgagtataaaaaatctacctgccgactatttattggctgcacaacagggtgatatcgataaagtaaaaacctgccttgcgctgggtgtcgatattaatacctgcgatcgtcaggggaaaacggcaattacgctggcaagtttatatcagcaatatgcttgcgttcaggcattaattgatgccggagcggatattaataagcaagattatacctgtttaaatccttttttaattagctgtctgaacgatgatttaacgctactacgaattattttaccggctaaacccgatcttaattgcgtaacccgttttggcggtgtcggcctgacgcctgcctgtgaaaaaggccatttaagtattgtaaaagagcttttggcgcatacggagattaacgttaaccagaccaaccatgtaggctggacgccgctactggaagcgattgtgcttaatgatggtggtattaaacagcaggcgattgtgcagttattgctggaacacggtgccagcccgcatctgaccgataaatatggcaaaacgccactggaactggcgcgggaacggggctttgaagagattgcgcagttactgattgccgcaggtgcataaaccgggaggcttgctatcaacacaccagaaagacggtgtgtgtgggcgctaactgcggatgcggattttctggcgcagcgggggcaaggacaggttgaacaggtctttgccagagcggtaaatatcgcactcccggctcgccagcagttgctgacgctgctttgtgaagagtacgacaatgcgccaaacagttgtcggttggcactcactcactttgatgatctgttccggcatggtgataaggttcagtttgacgatcaaggtattacggttggtcaacatcttcatatagagatgagtcgttgtcggcgttggctgtccccaaccttgcaaatgaccgctgtgaattttcaccttatcgcctggctacagtggcacgacattattcatcagcacctgggggaaaatgaaaccctgtttaattatcgcggcgataatccgttttatcaggcgttaaataaagaattacatattaaacgacgggcagttattcaggccgtaaacgataaacaaaatatcgccagtgcggtcgccagtatgatggggttagggattggccttacgccaagtgccgacgattatttaacaggtctggcgcttattttatttattcccgggcatccggcggaaaaatacaaagaggaattttatctcggtctgcaacgcggcaaaaataataccacattattaagtgccataacgctggaagccgcattacaacaacgctgccgggaaaatattcatcgttttattcacaacattatttatgacatccctgggaacgcaactcaggcaatagaaaaaattaaacatattggctccagttccggctgcgacatgctgtatggcatggccgatggttgtgcgctgagccaaacctacggagggaattatgtcagttaattaaccaaacctacggagggaattatgagtgttaaaatagtcattaaaccgaatacctattttgattctgtcagcctgatgtctatctccacgcgtgcaaataaactcgacggcgtcgagcaggcatttgtggcgatggcgaccgaaatgaataaaggcgtgctgaagaatttaggactgctgacgccggagctggagcaggcgaaaaacggcgacctgatgattgtcatcaatggtaaaagcggtgcggacaacgagcagttactggtggagattgaagaactgttcaacaccaaagcgcaaagcggcagccacgaggcgcgttacgccactattggcagcgccaaaaagcatatcccggaaagtaacctggcggtgattagcgtcaacggtctgtttgccgctcgcgaagcgcgtcaggcgctgcaaaacgatctcaacgtgatgctgttttccgataacgtcagtgttgaagatgaactggcgctcaagcaactggcccacgaaaaagggctgctgatgatggggccagactgtggcacggcgattatcaacggcgcggcgctctgttttggtaacgccgtgcgtcgcggcaacatcggtattgttggcgcatccggcaccggcagtcaggagttgagcgtccgcattcatgaatttggcggcggcgttagccaactgattggcaccggcgggcgcgacctgagcgagaaaatcggcggcctgatgatgctcgacgccatcgggatgctggaaaacgatccgcaaactgaaatcattgcgcttatctccaaaccgcctgcgcctgcggtggcccgcaaagtgctggaacgtgcgcgcgcctgccgcaagccggtggtcgtctgcttcctcgatcgtggcgaaacgccagtggatgagcaggggctacagtttgcccgcggcaccaaagaggcagcgctaaaagcggtgatgctctccggcgtgaaacaggaaaatctcgacctgcatacgcttaaccagccgttgattgcggatgtgcgtgcgcgtctgcaaccgcagcagaaatacattcgtggcctgttctgcggcggcacgctgtgcgacgaaaccatgttcgcggtgatggaaaaacatggcgatgtctacagcaacattcagcccgatccggaattccgcctgaaagatatcaaccgcagcatcaaacacaccttcctcgactttggcgatgacgacttcaccaatggcaagccgcacccgatgattgaccccaccaaccgcatcagtcgcttgatcgaagaggcgcgcgatccagaagtggcggtgatcgtgatggattttgtgctcggatttggaagccatgaagatccggtcggctccaccatcgagacgatcaaagaagcgaaagcgatcgccgctgccgaaggacgcgagttgatcattctcgcctatgtgctgggtaccgatcttgatacgccaagcttagaacaacaaagccagatgctgcttgatgccggagtgattctggcgagcagcagcaccaataccggattgctggcgcgtgaatttatctgcaaaggggaggaagcctgatgagccagagtctgtttagccaaccattgaacgttattaacgtcggcatcgccatgtttagcgatgacctgaaaaagcagcatgtagaagtgactcaactcgactggacgccgccggggcagggcaatatgcaggtggtgcaggcgctggataacattgccgatagcccgctggcggacaaaatcgccgccgctaaccagcaggcgctggagcgtattatccagagccatccggtgctgattggttttgatcaggcgattaacgtggtgccgggcatgacggcgaaaaccattcttcacgccgggccgccgatcacctgggaaaaaatgtgcggcgcgatgaaaggcgcggtcaccggagcgctggtgttcgaaggactggcgaaagatctcgacgaggcggctgaactggcggcttccggggagatcaccttcagcccgtgtcacgagcacgactgcgtgggaagcatggcgggtgttaccagcgccagcatgtttatgcacatcgtaaaaaacaaaacctacggcaacatcgcttataccaacatgagcgagcagatggcgaagattttgcgtatgggcgctaacgaccagagcgtgattgaccgcctgaactggatgcgtgatgtgcagggaccaatactgcgcgacgcgatgaaaattatcggcgaaatcgatctgcgcttaatgctggcgcaggcgctgcatatgggcgatgagtgccataaccgcaataacgccgggacgacactgctgattcaggcgctgacgccggggattattcaggcgggttattccgtcgagcaacagcgcgaagtgtttgagtttgtcgccagcagcgactacttctccggcccgacgtggatggcgatgtgtaaagcggcgatggatgcggcgcatggcatcgaatacagcaccgtggtcaccaccatggcgcgtaacggcgtcgagttcggcctgcgggtcagcggcctgccggggcaatggtttaccggcccggcgcagcaggtgatcggcccgatgtttgccggttataagccggaagatagcgggctggatatcggcgacagcgccatcaccgaaacctacggtattggcggatttgctatggcgaccgcgcccgctatcgtcgcgctggtgggcggcacggtggaagaagctattgatttctcccgtcagatgcgcgaaatcaccctcggtgaaaaccccaacgtcaccattccgctgctcggttttatgggcgtgccgagcgcaatcgacatcacccgcgtgggtagcagcggcattctgccggtgatcaacaccgccatcgcccataaagatgcgggcgtcggcatgattggcgcgggcattgtgcatccaccttttgcctgcttcgagaaagccattcttggctggtgcgaacgttacggcgtctgacctacatgttcatgccggatgcggcgtgaacgccttatccggcctacgaatggcgcaagaatctgtaggcctgataagcgtagcgcatcaggcatttgtcaccattgccggatgcggcgtgaacgccttatccggcctacgaatggcgcaagaatctgtaggcctgataagcgtagcgcatcaggcatttgccaccactgccggatgcggcgtggacgccttatccggcctacgagtggcgcgagaatctgtaggcctgataagcgtagcgcatcaggcatttgtcaccattgccggatgcggcgtgaacgccttatccggcctacgagtggcgcgagaattgtaagcctgataagcgtagcgcatcaggcagtctggcgttggtcataaccccatcaccctctgtagcggacataacaacatgaaagagcttgtggtcgttgccattggtggcaacagcattatcaaagataacgccagccagagcattgagcatcaggcggaggcggtgaaagccgtcgccgatacggtgctggaaatgctggcttccgattacgacattgtgctgacccacggcaacgggccgcaggtcgggctggatttacgccgtgcggagattgcccacaagcgcgaagggctgcccttaacgccgctggcgaactgtgtggcagatacgcagggcggcatcggctatctgatccaacaggcgctgaataaccggctggcgcgtcacggcgagaagaaagccgtcaccgtggtgactcaggtggaagtggataaaaacgatccaggttttgcccatcccaccaagcccatcggcgcattctttagtgacagccagcgtgacgaattacaaaaggcaaaccctgactggtgttttgttgaagatgccgggcggggctatcgccgcgtggtcgccagcccggaaccgaaacgtattgtcgaagcacctgccattaaagcgctgatccaacaaggttttgtcgtaattggcgcgggcggcggtggaattccggtagtgcgtactgacgcgggagattaccaaagcgtggacgcggttatcgacaaagatctctctaccgcgctgctggcccgtgaaattcacgccgacattcttgtgatcaccactggcgtcgaaaaagtgtgtattcactttggcaaaccgcagcagcaggcgctcgatcgggtggatattgccaccatgacccgctatatgcaggaagggcatttcccgcccggcagcatgttgccaaaaatcatcgccagcctgacatttttagaacaaggcggcaaagaagtgattatcaccacgccggaatgcctgcctgcggcgctgcgcggcgaaacgggcactcatattattaaaacgtaaggacgtaagatgaaagaaagcaatagccgccgtgaatttctgagccagagcggtaagatggtcaccgccgccgcgctgtttggtacctctgtgccgctcgcccatgcggcggtagctggcaccctaaactgcgaagcgaacaacaccatgaaaatcactgacccgcattactatctcgataacgtgctgctggaaaccggttttgactacgaaaatggcgtggcggtgcagacccgcacggcgcgccagaccgtggagattcaggacggcaaaattgtcgccctgcgcgagaacaagctgcatccggacgccacgctgccgcactatgacgctggcggtaagctgatgctgcccaccacccgcgacatgcatattcatctcgacaaaaccttttacggcgggccgtggcgcagcctcaatcgtccggcaggcaccaccatccaggacatgatcaaactcgagcagaaaatgctgccggaactgcaaccgtacactcaggagcgggcagaaaaactgattgatttattgcagagcaaaggcaccaccattgcccgcagccactgcaatatcgaaccggtttccggcctgaaaaatctgcaaaatttgcaggcggtgctggcgcgacgtcaggcgggctttgagtgtgaaatcgtcgccttcccgcagcacggtttgctgctgagcaaatctgaacctttaatgcgtgaagcgatgcaggcgggggcgcattacgtcggcggcctggacccgaccagtgttgatggcgcgatggaaaaatccctcgacaccatgttccagattgcgctggactacgacaaaggcgtcgatattcacctgcacgaaaccactccggcaggcgtggcagccatcaattatatggttgaaacggtagagaaaacgccacagctgaagggcaagctgaccatcagtcacgcctttgcgctggcaacgctcaacgagcaacaggtagatgaactggcgaaccggatggtggtgcaacaaatttctatcgccagcacggtgccgattggcacgctgcatatgccgctcaaacagttgcacgacaaaggcgtaaaagtgatgactggcactgacagcgttatcgaccactggagcccttatggtctgggcgacatgctggaaaaagccaatctgtacgcgcagctctatattcgtcctaacgaacagaacctctcccgcagcctgtttttagccactggcgatgtattgccgctgaatgaaaaaggcgagcgtgtatggccaaaagcgcaggatgacgccagctttgtgctggtggacgcctcctgttccgccgaggcggtggcgcgtatcagcccgagaaccgcaacgttccataaagggcaactggtgtgggggagtgtggcaggttgatgcgcatttgaaacgcctgcaacggtgaatagtaagagatttaagccccagggagtggggcaatctgaatatgagtgtgtcggcagaaatggacattatctttgaggaatatgcccttattgacgttgtgtagataactatttgtctacgtgaaaagatcatcagttttgccgattttagtcttttacagatagcaaatatcacacttacaggcgctcgccttatggggaacgttgctgctctgtttcattcaggctcgcggcatgttggggctggatcgggtggtttaaatattggctatattcaatggacgcgttttgccgcgatgacatatcaggcgttgccaaatacacatagctaatcaggagtaaacacaatgaagatcaaagctgttggtgcatattccgctaaacaaccacttgaaccgatggatatcacccggcgtgaaccgggaccgaatgatgtcaaaatcgaaatcgcttactgtggcgtttgccattccgatctccaccaggtccgttccgagtgggcggggacggtttacccctgcgtgccgggtcatgaaattgtggggcgtgtggtagccgttggtgatcaggtagaaaaatatgcgccgggcgatctggtcggtgtcggctgcattgtcgacagttgtaaacattgcgaagagtgtgaagacgggttggaaaactactgtgatcacatgaccggcacctataacagcccgacgccggacgaaccgggccatactctgggcggctacagtcaacagatcgtcgttcatgagcgatatgttctgcgtattcgtcacccgcaagagcagctggcggcggtggctcctttgttgtgtgcagggatcaccacgtatagcccgctacgtcactggcaggccgggccgggtaaaaaagtgggcgtggtcggcatcggcggtctgggacatatggggattaagctggcccacgcgatgggggcacatgtggtggcatttaccacttctgaggcaaaacgcgaagcggcaaaagccctgggggccgatgaagttgttaacagtcgcaatgccgatgagatggcggctcatctgaagagtttcgatttcattttgaatacagtagctgcgccacataatctcgacgattttaccaccttgctgaagcgtgatggcaccatgacgctggttggtgcgcctgcgacaccgcataaaagcccggaagttttcaacctgatcatgaaacgccgtgcgatagccggttctatgattggcggcattccagaaactcaggagatgctcgatttttgcgccgaacatggcatcgtggctgatatagagatgattcgggccgatcaaattaatgaagcctatgagcgaatgctgcgcggtgatgtgaaatatcgttttgttatcgataatcgcacactaacagactgaaaaaattaataaataccctgtggtttaacatattaacttcgctctccacttaactttttagttaaggagagcgaaataatatcaaagtagcagtaaaacctataacgtaaatttaaattgttaaattaacgccctccagtacacaatacttcacacgttagttatgagcgatttctgatagtgcctggtttaatcagagctttattatctgcgacgtttatttttatttaagagagatcgcgatgataagtttaaaagctccgcacaataatttgatgccatatacgcaacaaagcatacttaatacggttaaaaacaatcagttaccagaggatatcaaaagctccctggtttcctgtgtcgatatattcaaggttttgattaaacaatattatgattatccttatgattgtcgtgatgatttagtcgatgacgacaaactcattcatctcatggctgccgtacgagactgtgagtggagtgacgataacgcactcaccataaatgtgcagtttaatgatttccctggattttatgactggatggattaccctgatcacccggttaagtttgtttttcacatacttgaaaatcaaaaagggacagtttgggtatatgaccaggatgatgcgtttcttgatattaaagcaaacgtgcaggctggacgctttaccgggcttaagaaattagtgcagtttatcgatagtgtgcgaacagattgcaaatgtattcttcttgaataccatatgcctttgctgagaattttccctaaagggaaagagtgtatgcatgtggaaaaatggcttcgcgaaatgagctctattccggagacagacgcgcccattaagcaggcgcttgcgcatggattattattacacttaaaaaatatctaccctgtttttcctgaaagtctggtgatgttattgctctctgttctggacgtaaaaacatacagagatgatgcgcgattaaatgaatggatatctaatagagtgcaggaattaggtgacagatattatcctgtaaataagcacgttaaaatccgctacactctttaattcagaaagggttccacctgcaagttgttattccacctgagagtgaatcgcaatgcaggtaatcatttcatctgtatatctgtatgccaactggcattccatctcttttttcgccgatattttgttgtgatcggcgacacttcgcttaaaaaagcaccagtagtggtttcgcagccatgcggtgtataaaaaatgatctcatgcagatgttttgtgaatgtgttggttgacattcatatgaaaaaaatcataattccatcatgtttgtgtggggtcttttctgtatcttacgcatcgcactcaagcctgacagaaaatatgctgtaaggctcatatcaaaaaccgccattagctcatcaggaagagcagacgacaaccaggattgttgtatggtacggggttcgaggcctcgatggcggtccaacttttcaaaactcttctgaatcagatccccttattaagttccctgcaaagtggaacattgccattgtttggctatagtggatggggcagaccaatgaaaaaagcccacacaggggagagtgggctgaaatgggaggctaaagacagtagtaaacttatcggaaataaggaccacgcattacgggggctaagtagcccgatggccgtgattcggcaaatcaggttgattacgtaaagagtaaattatctgctcaccgctgcgtcaccccttcgtaaatcaggcgtagcgcgaatacaccaataattgcaccaataacccgactggcaacgcgttgcatacgcccataagcacgacgcacagcgggcaaagaaaacgcctgactaagaaaaactcgccagataatacttgcgagcacaatccccgcccaggccattaaacgtgcccatgttggtgtttctgcatttaatgttacactgaaaatactgataaaaaataaaacggtttgcgggttagagagatcggtaattaatccgcggcgaaaaaagacataccagggggcgctaatcggttgttgtagtgtgctcatttgcggtgtactctggcggcgcatgctgcaccacgcaaaccataagagataagcgccgccgacgattctgataaggctaaaaatctcctcacactgcgtaattagcgttgcaagaccaaacaaacccaacccggaataaaatgcatcgcccagcgccacgcccagcccggtcagcacccctgcgcgtcgaccggaagccaggctggtttgtactaccacaaagagattggctcccggattaaaaaaagtaatcacgaacagtcctacggtcaggtaaacggcatgcaaaggatccatagtgatttcatccataaataagtgaactaactgcatcatatttctaccaaaaataatcgggtgcgagagagatcacaaagtgtcttatttccggttactggcgtttatgccctgactgaactaattattaatcaacccaataatgtgggtgggtgatagtgtgataacaactctggagccgtaatatgaaaataatctctaaaatgttagtcggtgcgttagcgttagccgttaccaatgtctatgccgctgaattgatgaccaaagcggaatttgaaaaagttgaaagccagtatgaaaaaataggtgatattagtaccagcaatgaaatgagcactgcagatgcaaaagaagatttgatcaaaaaagcggatgaaaaaggggctgatgtgttggtactgacctccggtcaaactgacaataagatccacggcacggcaaatatttataagaagaagtaattctgaatcctatgtaaacatctccgatgcgtaagtttatcggtgatcatctattgaaatttatgccggataaagcgttcgcgctgcattcggcagttcagcttttcagccgccgccagaacgtcgtccggctgatgcctaaataattcgccgctgctgttttatcgccattaaatttctccagtgcctgttgtggtgtcagtaagcgtggagcgggagttttcgcgctctcgcgcgccagttccggcagtagcagttgcataaactgcggcgttaaatccggcgtcggttccacacttaaaaacagcgccagtcgttccatcatattgcgcagttcacgaatattgcctggccagtcgtagtgcagcagcacagtttcacttgcctgtaacccctggcgtaatgcagcagaaaatggggcggagagcgccgccagagacactttcaaaaagctttccgccagcggaagaatatccgccacccgctcgcgcagtggtggcaattgcagacgcaaaatactcagccgataaaacagatcacggcgaaaacgtccttgctgcatatcttcttccagattgcagtgagtggcgctaatgacccgtacatctaccggaacaggctgatgcccgccgacgcgggtgacctctttttcttccagcacccgcagcagccgggtctgcaaaggtagcggcatttcgccaatctcatccagaaacagcgtaccgccgtgggcaatttcgaacagcccggcgcgacctccgcgtcggctgccggtaaacgccccttcctcatagccaaacagttctgcttccagcaggctttcggcaatcgccccgcagttgacggcaacaaacggatggctctttttgccctgtcgcgcatcgtggcgggcaaaatattcccgatgaatcgcctgggccgccagctctttgcccgtccccgtttccccctcaatcaacaccgccgcactggagcgggcatacagcaaaatagtctgccgtacttgttccatctgtggactttgaccgagcatatcgcccagcacgtaacgagtacgcagggcgttgcgggtggcatcgtgagtgttatggcgtaagctcatgcgcgtcatatccagcgcatcgctgaacgcctggcgcacggtggcggcggaatagataaaaattccggtcattccggcttcttctgccaaatcggtaatcagccctgcgccgaccaccgcttcggtgccgttagcttttagctcgttaatctgcccgcgtgcgtcttcctcggtaatgtagctacgttggtcgaggcgcaaattaaaggttttttgaaacgccaccagcgctggaatggtttcctgataggtgacaacgccgatagaagaggtgagttttccggcttttgccagtgcctgtaacacatcgtagccgctcggtttaatcaaaataactggcacactcaggcggcttttcaggtacgcgccgttagagccagccgcgatgatggcgtcacagcgttcgtttgccagtttcttgcggatgtaggtcactgctttttcaaagccaagctgaataggggtaatgttcgccaggtgatcaaactcgaggctgatatcgcgaaacagctcgaacaggcgcgttacagataccgtccagataaccggtttgtcgtcattaagccgtggtggatgtgccatagcgcaccgcaaagttaagaaaccgaatattgggtttagtcttgtttcataattgttgcaatgaaacgcggtgaaacattgcctgaaacgttaactgaaacgcatatttgcggattagttcatgactttatctctaacaaattgaaattaaacatttaattttattaaggcaattgtggcacaccccttgctttgtctttatcaacgcaaataacaagttgataacaaaggatgggctatgtctctacactctccaggtaaagcgtttcgcgctgcactgactaaagaaaatccattgcagattgttggcaccatcaacgctaatcatgcgctgttggcgcagcgtgccggatatcaggcaatttatctttctggcggtggcgtggcggcaggtagcctggggctgcccgatctcggtatttctacccttgatgatgtgctgaccgacattcgccgtatcaccgacgtttgtagcctgccgctgctggtggatgcggatatcggttttggttctagcgcctttaacgtggcgcgcaccgtgaaaagcatgattaaagccggtgcggcaggattgcatattgaagatcaggttggtgcgaaacgctgcggtcatcgtccgaataaagcgatcgtcagcaaagaagagatggtggatcggatccgcgcggcggtggatgcgaaaaccgatcctgattttgtgatcatggcgcgcaccgatgctctggcggtagaggggctggatgcggcgatcgagcgtgcgcaggcctatgttgaagcgggtgccgagatgttgttcccggaggcgattaccgaactcgccatgtaccgccagtttgccgatgcggtgcaggtgccgatcctcgccaacatcaccgaatttggtgccacgccgctgtttaccaccgacgaattacgcagcgcccatgtcgcaatggcgctgtacccacttagtgcgttccgcgccatgaaccgcgccgctgaacatgtctacaacgtcctgcgccaggaaggcacgcagaaaagcgtcatcgacaccatgcagacccgcaacgagctgtacgaaagcatcaactactaccagtacgaagagaagctcgacaacctgtttgcccgtagccaggtgaaataaaaaacgcccgttgattgtattcgacagccgatgcctgatgcgtcgctgacgcgacttatcaggcctacgaggtgcactgaactgtaggtcggataagacggatggcgtcgcatccgacaaccgatgcctgatgcgccgctgacgtgacttatcaggcctacggggtgcactgaactgtaggtcggataagacgcatagcgtcgcatccgacaaccgatgcctgatgcgccgctgacgcgacttatcaggcctacggggtgcactgaactgtaggtcggataagacgcatagcgtcgcatccgacaaccgatgcctgatgcgccgctgacgcgacttatcaggcctacggggtgaactgaactgtaggtcggataagacgcatagcgtcgcatccgacaacaatctcgaccctacaaatgataacaatgacgaggacaacatgagcgacacaacgatcctgcaaaacagtacccatgtcattaaaccgaaaaaatctgtggcactttctggcgttccggcgggcaatacggcgctctgcaccgtgggtaaaagtggcaatgacctgcattaccgcggctacgatattcttgatctggcgaaacattgcgaatttgaagaagtggcgcatctgctgatccacggcaaactgccgacccgtgacgaactcgccgcttacaaaacgaaactgaaagccctgcgcggtttaccggctaacgtgcgtaccgtgctggaagccttaccggcggcgagccacccgatggatgttatgcgcaccggtgtttccgcgctcggctgcacgctgccagaaaaagaggggcataccgtctctggcgcgcgggatattgccgacaaactgctggcgagccttagcagcattctcctttattggtatcactacagccacaacggcgaacgcatccaaccggaaaccgatgacgactccatcggcggtcacttcctgcatctgctgcacggcgaaaagccaagccaaagctgggaaaaggcgatgcatatcagcctggtgctgtacgccgaacacgagtttaacgcctccacctttaccagtcgggtgattgcgggcaccggctctgatatgtattccgcgattattggcgcgattggcgcactgcgcgggccaaaacacggcggggcgaatgaagtgagcctggagatccagcaacgctacgaaacgccggacgaagccgaagcagatatccgcaagcgcgtggaaaacaaagaagtggtcattggttttggtcatccggtttacaccatcgctgacccgcgccaccaggtgattaaacgtgtggcgaagcagctcagccaggaaggcggcagcctgaagatgtacaacatcgccgatcgcctggaaacggtgatgtgggagagcaaaaagatgttccccaatctcgactggttctctgctgtttcctacaacatgatgggcgttcccaccgagatgttcacaccactgtttgttatcgcccgcgtcaccggctgggcggcgcacattatcgaacaacgtcaggacaacaaaattatccgtccttccgccaattatgttggaccggaagaccgcccgtttgtcgcgctggataagcgccagtaaacctctacgaataacaataaggaaacgtacccaatgagtgctcaaatcaacaacatccgcccggaatttgatcgtgaaatcgttgatatcgtcgattacgtcatgaactacgaaatcagctctaaagtggcctacgacaccgcacattactgcctgctcgacacgctcggctgcggtctggaagctctcgaatacccggcctgtaaaaaactgctggggccaattgttcccggcaccgtcgtacccaacggcgtgcgcgtccccggaactcagttccagctcgaccccgtccaggcggcatttaacatcggcgcgatgatccgctggctcgatttcaacgatacctggctggcggcggagtggggccatccttccgacaacctcggcggcattctggcaacggcggactggcttagccgcaacgcggtcgccagcggcaaagcgccgttgaccatgaaacaggtgctgaccgcaatgatcaaagcccatgaaattcagggctgcatcgcgctggaaaactcctttaaccgcgtcggcctcgaccacgttctgttagtgaaagtggcttccaccgccgtggtcgccgaaatgctcggcctgacccgcgaggaaattctcaacgccgttagcctggcgtgggtggacggtcagagcctgcgcacctatcgccatgcgccgaacaccggcacgcgtaaatcctgggcggcgggcgatgccacttcccgcgcggtacgtctggcactgatggcgaaaacgggcgaaatgggttacccgagtgccctgactgcgccggtgtggggcttctacgacgtctcctttaaaggtgaaagcttccgcttccagcgcccgtacggttcctacgttatggaaaatgtgctgttcaaaatctccttcccggcggagttccactcccagacggcagttgaagcagcgatgacgctctatgaacagatgcaggcagcaggcaaaacggcggcggatatcgaaaaagtgaccattcgcacccacgaagcctgtattcgcatcatcgacaaaaaagggccgctcaataacccggcagaccgcgatcactgcattcagtacatggtggcgatcccgctgctattcgggcgcttaacggcggcagattacgaggacaacgttgcgcaagataaacgcattgacgccctgcgcgagaagatcaattgctttgaagatccggcatttaccgctgactaccacgacccggaaaaacgcgccatcgccaatgccattacccttgagttcaccgacggcacacgatttgaagaagtggtggtggagtaccccattggtcatgctcgccgccgtcaggatggtattccgaaactggtcgataaattcaaaatcaatctcgcgcgccagttcccgactcgccaacagcagcgcattctggaggtttctctcgacagagctcgcctggaacagatgccggtcaatgagtatctcgacctgtacgtcatttaagtaaacggcggtaaggcgtaagttcaacaggagagcattatgtcttttagcgaattttatcagcgtagcattaacgaaccggagcagttctgggccgagcaggcccggcgtattgactggcagacgccctttacgcaaacgctcgatcacagcaatccgccgtttgcccgttggttttgtgaaggccgaaccaacttgtgccacaacgccatcgaccgctggctggagaaacagccagaggcgctggcgctgattgccgtctctagcgaaacagaagaagagcgcacctttacctttcgtcagctgcatgacgaagtgaacgcggtggccagtatgttgcgtagtttgggtgtgcagcgcggcgatcgggtgctggtgtatatgccgatgattgccgaagcgcatattactctgctggcctgcgcgcgcattggcgctattcacagcgtggtgtttggtggatttgccagctacagcgtggcggcgcgaattgatgacgctaaaccggtgctgattgtcagcgctgatgccggagcgcgcggtggcaaaatcattccctataaaaaattgctcgacgatgcgataagtcaggcgcagcaccagccacgccatgttttgctggtggatcgcgggctggcgaaaatggcgcgcgtcagcgggcgggatgtcgatttcgcgagcttgcgccatcaacacatcggcgcgcgggtaccggtggcgtggctggaatccaacgaaacctcctgcattctctacacttccggcacgaccggcaaacctaaaggcgtgcagcgtgacgtcggcggatatgcggtggcgctggcgaccagcatggacaccatttttggcggcaaagcgggcagcgtgttcttttgcgcaagcgatatcggctgggtggtggggcatagctatatcgtttacgcgccgctgctggcggggatggcgactatcgtttacgaaggattgccgacctggccggactgcggcgtgtggtggacaatcgtcgagaaatatcaggttagccggatgttcagtgcgccgaccgccattcgcgtgctgaaaaaattccctaccgctgaaattcgcaaacacgatctcagcagcctggaagtgctctatctggctggagaaccgctggacgagccgaccgccagttgggtgagcaatacgctggatgtgccggtcatcgacaactactggcagaccgaatccggctggccgattatggcgattgctcgcggtctggacgacaggccgacgcgtctgggaagccccggtgtgccgatgtatggctataacgtgcagttgcttaatgaagtcaccggcgaaccgtgtggcgtcaacgagaaagggatgctggtggtggaagggccgctgccgccggggtgtattcagaccatctggggcgacgacggccgctttgtgaagacttactggagcctgttttcccgcccggtgtacgccacctttgactggggcatccgtgacgctgacggttatcactttattctcgggcgcactgacgatgtaattaacgttgccgggcatcggctggggacgcgcgagattgaagagagtatctccagccatccgggcgttgccgaagtggcggtggttggggtgaaagatgcgctgaaagggcaggtggcggtggcgtttgtcattccgaaagagagcgacagtctggaagatcgtgatgtggcgcacagccaagagaaggcgattatggcgctggtggacagccagattggcaactttggccgcccggcgcacgtctggtttgtcagccaattgccaaaaacgcgatccggaaaaatgctgcgccgcacgatccaggcgatttgcgaaggacgcgatcctggagatctgacgaccattgatgatcctgcgagcttggatcagatccgccaggcgatggaagagtaagttattgtcggatgcgtcgcgcggtgcatccggcactgtgtgccgatgcctgatgcgacgctgacgcgttttatcatgcctacggacctgaaccgtaggtcggataaggcgctcgcgtcgcatccgacaccatgctcagatgcctgatgcgacgctgacgcgtcttatcaggcctacccactgtttttacaccgataatttttcccccacctttttgcactcattcatataaaaaatatatttccccacgaaaacgattgctttttatcttcagatgaatagaatgcggcggattttttgggtttcaaacagcaaaaagggggaatttcgtgagccaagataacaactttagccaggggccagtcccgcagagcgcgcggaaaggggtattggcattgacgttcgtcatgctgggattaaccttcttttccgccagtatgtggaccggcggcactctcggaaccggtcttagctatcatgatttcttcctcgcagttctcatcggtaatcttctcctcggtatttacactagttttctcggttacattggcgcaaaaaccggcctgaccactcatcttcttgctcgcttcagctttggtgttaaaggcagttggctgcctagtctgctactgggcggaactcaggttggctggtttggcgtcggtgtggcgatgtttgccattccggtgggtaaggcaaccgggctggatattaatttgctgattgccgtttccggtttactgatgaccgtcaccgtcttttttggcattagcgcgctgacggttcttagcgtgattgcggttccggctatcgcctgcctgggcggttattccgtgtggctggctgttaacggcatgggcggcctggacgcattaaaagcggtcgttcccgcacaaccgttagatttcaatgtcgcgctggcgctggttgtggggagttttatcagtgcgggtacgctcaccgctgactttgtccggtttggtcgcaatgccaaactggcggtgctggtggcgatggtggcctttttcctcggcaacagcttgatgtttattttcggtgcagcgggcgctgcggcactgggcatggcggatatctctgatgtgatgattgctcagggcctgctgctgcctgcgattgtggtgctggggctgaatatctggaccaccaacgataacgcactctatgcgagcggtttaggtttcgccaacattaccgggatgagcagcaaaacccttagcgtaatcaacggtattatcggtacggtctgcgcattatggctgtataacaattttgtcggctggttgaccttccttagcgcagctattcctccagtgggtggcgtgatcatcgccgactatctgatgaaccgtcgccgctatgagcactttgcgaccacgcgtatgatgagtgtcaattgggtggcgattctggcggtcgccttggggattgctgcaggccactggttaccgggaattgttccggtcaacgcggtattaggtggcgcgctgagctatctgatccttaacccgattttgaatcgtaaaacgacagcagcaatgacgcatgtggaggctaacagtgtcgaataactaagacgcatgtggaggctaacagtgagcaataacgctttacaaacaattattaacgcccggttaccaggcgaagaggggctgtggcagattcatctgcaggacggaaaaatcagcgccattgatgcgcaatccggcgtgatgcccataactgaaaacagcctggatgccgaacaaggtttagttataccgccgtttgtggagccacatattcacctggacaccacgcaaaccgccggacaaccgaactggaatcagtccggcacgctgtttgaaggcattgaacgctgggccgagcgcaaagcgttattaacccatgacgatgtgaaacaacgcgcatggcaaacgctgaaatggcagattgccaacggcattcagcatgtgcgtacccatgtcgatgttagcgatgcaacgctaactgcgctgaaagcaatgctggaagtgaagcaggaagtcgcgccgtggattgatctgcaaatcgtcgccttccctcaggaagggattttgagctatcccaacggtgaagcgttgctggaagaggcgttacgcttaggggcagatgtagtgggggcgattccgcattttgaatttacccgtgaatacggcgtggagagcctgcataaaaccttcgccctggcgcaaaaatacgaccgtctcatcgacgttcactgtgatgagatcgatgacgagcagagccgctttgtcgaaaccgttgctgccctggcgcaccatgaaggcatgggcgcgcgagtcaccgccagccacaccacggcaatgcactcctataacggggcgtataccagtcgcctgttccgcttgctgaaaatgtccggtattaactttgtcgccaacccgctggtcaatattcatctgcaaggacgtttcgatacgtatccaaaacgtcgcggcatcacgcgcgttaaagagatgctggagtccggcattaacgtctgctttggtcacgatgatgtcttcgatccgtggtatccgctgggaacggcgaatatgctgcaagtgctgcatatggggctgcatgtttgccagttgatgggctacgggcagattaacgatggcctgaatttaatcacccaccacagcgcaaggacgttgaatttgcaggattacggcattgccgccggaaacagcgccaacctgattatcctgccggctgaaaatgggtttgatgcgctgcgccgtcaggttccggtacgttatagcgtacgtggcggcaaggtgattgccagcacacaaccggcacaaaccaccgtatatctggagcagccagaagccatcgattacaaacgttgaacgactgggttacagcgagcttagtttatgccggatgcggcgtgaacgccttatccggcctacgtagagcactgaactcgtaggcctgataagcgtagcgcatcaggcaattccagccgctgatctgtgtcagcggctaccgtgattcattcccgccaacaaccgcgcattcctccaacgccatgtgcaaaaatgccttcgcagcggctgtctgccagctgtagtttatgccggatgcggcgtgaacgccttatccggcctacgtagagcactgaactcgtaggcctgataagcgtagcgcatcaggcaattccagccgcagacctgtgtcagcggttaccgactttcatttccgccaacaaccgcgcatttatccaacgccatgtgcaaaaatgccttcgcggcggctgtctgccagctatttttccgccgcaacaaaaccgccgttctctccagtagtggcggggcaagagaaatagctttaagcccgtcatgttgtgtggcaatcgctgctggtaacaatgtggaaagggaagtgcggcgaatcagctccagaaccgcgctaatactgttcgcctcaatgaccacctgtggatgtagccccgctttctcgcagtagtggtcaatttgctctctggtggcaaattccgcgctgagcaggaccagtttttcatcatgcaagcgactcaacgccacctgttcatggacggccagcggatgatgttgcgccacgactaacgctaaactttctgtcagtaaaggaattgcctccagctccgggctatgcacaggcgcgaaggcaatcccaacgtccaactcgtcgcggcaaagcatatcctcgattttctcctggctcatttcctgtagctggagcgtgatgctgggatagcgcgcatagaaatccgccattaaggggccgataaagtagctcgtaaaggtgggggtgacggcgatacgcaggcttcctcgcgtcagatcggcaacatcatgaatcgcccgtttacccgcccccagttcctgtaacgcccggctggcgtactgtcgccagacttctcctgcatcagtgagacgaatcgttcgcccgctacggtcaaacagcggcacgcctaaactctcctctaactggcgaatctgctgggaaagcgcaggttgggagacgtgcaacgcactggcggcacgggtgaagctgccatgttcagccacggcaagaaaataattgatatgtcgagagagcattcgcaacctataagtaaatccaatggaactcatcataaatgagacttttaccttatgacaatcggcgagtagtctgcctctcattccagagacagacagaggttaacggtgaaagagattattgatggattccttaaattccagcgcgaggcatttccgaagcgggaagccttgtttaaacagctggcgacacagcaaagcccgcgcacactttttatctcctgctccgacagccgtctggtccctgagctggtgacgcaacgtgagcctggcgatctgttcgttattcgcaacgcgggcaatatcgtcccttcctacgggccggaacccggtggcgtttctgctagcgtggagtatgccgtcgctgcgcttcgggtatctgacattgtgatttgtggtcattccaactgtggcgcgatgaccgccattgccagctgtcagtgcatggaccatatgcctgccgtctcccactggctgcgttatgccgatagtgcccgcgtcgttaatgaggcgcgcccgcattccgatttaccgagtaaagctgcggcgatggtacgtgaaaacgtcattgctcagttggctaatttgcaaactcatccaagcgtgcgcctggcgctcgaagaggggcggatcgccctgcacggctgggtctacgacattgaaagcggcagcatcgcagcttttgacggcgcaacccgccagtttgtgccactggccgctaatcctcgcgtttgtgccataccgctacgccaaccgaccgcagcgtaaccttatttttaaaccatcaggagttccaccatgattcagagtcaaattaaccgcaatattcgtcttgatcttgccgatgccattttgctcagcaaagctaaaaaagatctcagttttgccgagattgccgacggcaccggtctggcagaagcctttgtaaccgcggctttgctgggtcagcaggcgcttcctgccgacgccgcccgcctggtcggggcgaagctggatctcgacgaagactccattctactgttgcagatgattccactgcgtggctgcattgatgaccgtattccaactgacccaacgatgtatcgtttctatgaaatgttgcaggtgtacggtacaaccctgaaagcgttggttcatgagaaatttggcgatggcattattagcgcgattaacttcaaactcgacgttaagaaagtggcggacccggaaggtggcgaacgtgcggtcatcaccttagatggtaaacatctgccgaccaaaccgttctgacagccatgcgcaaccatcaaaagacgttcacgatgctgctggtactggtgctgattggtcttaatatgcgaccactgctcacctccgtcgggccactgctaccgcaattgcgccaggcgagcggaatgagctttagcgtggctgccctgttgaccgctctgccggtggttaccatgggcgggctggcgctggccggaagctggcttcatcagcatgtcagcgaacgtcgcagtgtcgccatcagtctgttgctgattgccgtcggtgcattgatgcgtgagctttacccgcaaagtgcgctgctgcttagcagcgcactgcttggtggggtggggatcggcatcattcaggcggtgatgcctagcgtgattaaacggcggtttcagcagcgcacgccactggtgatggggctgtggtccgcggctctgatgggcggcggtgggcttggtgccgccataacgccctggttagttcaacatagcgaaacctggtatcaaacactcgcctggtgggcgctgcctgccgttgttgcgctctttgcctggtggtggcaaagcgcccgcgaggtcgcctcttcccacaagacaacaaccactccggttcgcgtggtattcactccccgcgcgtggacgctgggtgtttacttcggtctgattaacggcggttacgccagcctgattgcctggttacccgctttctatattgagattggtgccagcgcgcagtacagcggttccttactggcattgatgacgcttgggcaagccgcaggagctttgctgatgcctgctatggctcgccatcaggatcggcgcaaactgttaatgctggcgctggtgttacaactggtggggttctgcggctttatctggctgccgatgcaattgccggtattgtgggcgatggtgtgtgggttaggtctgggcggcgcgtttccgctctgtttgctgctggcgctcgatcactctgtgcaaccggctattgctggcaagctggtggcgtttatgcagggaatcggttttatcatcgccgggcttgccccgtggttttctggcgtgctgcgtagtatcagcggcaattacctgatggactgggcatttcatgcgctgtgcgtcgttgggctgatgatcataaccctgcgttttgcaccagtacgttttccgcagctgtgggtcaaagaggcatgatgcgacgcttgttcctgcgctttgttcatgccggatgcggctaatgtagatcgctgaacttgtaggcctgataagcgcagcgtatcaggcaatttttataatttaaacactgctttcaactttataatctttgaaataatagtgcttatcccggtcgtttatttcgcgaataacccgacaaggaacgccagccgccacgacgtttggtggaatgtcttttgtgacgatactacccgcgccaataacagaattatccccgatggtgacgcctggattaataaccacatgacttccgatccagacgttattgccaatcgttatcggaaaagagtacatctcgccgttttttctcaattcatggtgtacagggtgtcccgtaacggaaagagtaacgttgggtgcaatcagtacgttatcaccgattgttaccgtgtagtcatcgacaatggttaaattgaaatttgcataaaaattgcggcctatatggatgttggaaccgtaagagaaatagacaggcggttctacccaggcgttttcccctaccgtggcaaacatttctttaatcaggctttctcttttttcaacttcacttggatggctgtgattaaactcatacattaacgttttcccacgaagtcttttttccggtaagccttcgcacatatcggtaaatagcttgcctgctcttattctttcggtcattggcatgttcaatgcgatcactccgttatgatatgttggtcggataaggcgctcgcgccgcatccgacattgattgcttaagcgacttcattcacctgacgacgcagcagggaaagcgggccggggccgctaagcgtgaacacggaaattaaggtgaagcccagcgccaccagacccagcaccagataagcgccctggaaaccgatgctttcatacatattgcccgccagtacagacataaaaatcatcgccagttgcttaaagaagcagaaacagaccagataaatcgtcgcactaaaacgcacttcaaactggctggtaatatatttaaagcagcccaccagcaggaacggtacttcaaacatatgcagcgttttcagaataaccacttccagcgcactggtggcgaagctactgccaataatacgtacagacataatagtgccagccagcagcagggcgtttttcccaccgatgcgattaatgatcagtggcgcaaagaacataatgctggcgttaagtaattcgcccattgtcgttacgtagccaaatacccgcgtaccctgttcaccggtagcaaagaagctagtaaagaaattagcaaactgttggtcaaaaacatcgtaggtgcaggaaacgccaataacatacagactcaaaaaccacagttttggctgtctgaacagttccagtgccagcttaaggctaaatgcgctatggttggcacctaccgcattggcaaccgtggcagaagagggcgcatccgttttggcgaaaaagagtaaaacggcgaggatgagtgcacagccagagcccagccagaaaacaaactgattattgatggtgaacatgatgccgacaatgctggcacacagcgcccagccaacacagccaaacatccgcgcgcgaccaaattcgaaattactgcgacggctgactttctcaataaatgcctctactgctggcgcaccggcgttaaaacaaaagcctagataaataccaccaacaatgcttcctactaaaatgttgtattgtaacagtggcccgaagataaaaataaagaacggcgcaaacatcactaacatgccggtaataatccacagcaggtatttgcgcagcccgagtttgtcagaaagcagaccaaacagcggttggaataataggctgaacagagaaatagcggcaaaaataatacccgtatcacttttgctgatatggttgatgtcatgtagccaaatcgggaaaaacgggaagtaggctcccatgataaaaaagtaaaagaaaaagaataaaccgaacatccaaaagtttgtgttttttaaatagtacataatggatttccttacgcgaaatacgggcagacatggcctgcccggttattattatttttgacaccagaccaactggtaatggtagcgaccggcgctcagctggaattccgcgcttacactcgggctccaggagtcgtcgccaccaatccccatatggaaaccgtcgatattcagccatgtgccttcttccgcgtgcagcagatggcgatggctggtttccatcagttgctgttgactgtagcggctgatgttgaactggaagtcgccgcgccactggtgtgggccataattcaattcgcgcgtcccgcagcgcagaccgttttcgctcgggaagacgtacggggtatacatgtcactcaatggcagatcccagcggtcaaaacaggcggcagtaaggcggtcgggatagttttcttgcggccctaatccgagccagtttacccgctctgctacctgcgccagctggcagttcaggccaatccgcgccggatgcggtgtatcgctcgccacttcaacatcaacggtaatcgccatttgaccactaccatcaatccggtaggttttccggctgataaataaggttttcccctgatgctgccacgcgtgagcggtcgtaatcagcaccgcatcagcaagtgtatctgccgtgcactgcaacaacgctgcttcggcctggtaatggcccgccgccttccagcgttcgacccaggcgttagggtcaatgcgggtcgcttcacttacgccaatgtcgttatccagcggtgcacgggtgaactgatcgcgcagcggcgtcagcagttgttttttatcgccaatccacatctgactaagaaagccactctggcggttaaattgccaacgcttattacccagctcgatgcaaaaatccatttcgctggtggtcagatgcgggatggcgtgggacgcggcggggagcgtcacactgaggttttccgccagacgccactgctgccaggcgctgatgtgcccggcttcactccatgcggtcgcgttcggttgcactacgcgtactgtgagccagagttgcccggcgctctccggctgcggtagttcaggcagttcaatcaactgtttaccttgtggagcgacatccagaggcacttcaccgcttgccagcggcttaccatccagcgccaccatccagtgcaggagctcgttatcgctatgacggaacaggtattcgctggtcacttcgatggtttgcccggataaacggaactggaaaaactgctgctggtgttttgcttccgtcagcgctggatgcggcgtgcggtcggcaaagaccagaccgttcatacagaactggcgatcgttcggcgtatcgccaaaatcaccgccgtaagcgctccacgggttgccgttttcatcatatttaatcaggctctgatccacccagtcccagacgaagccgccctgtaaacggggatactgacgaaacgcctgccagtatttagcgaaaccgccaagactgttacccatcgcgtgggcgtattcgcaaaggatcagcgggcgcgtctctccaggtaggctaagccattttttgatggaccatttcggcacagccgggaagggctggtcttcatccacgcgcgcgtacatcgggcaaataatatcggtggccgtggtgtcggctccgccgccttcatactgcaccgggcgggaaggatcgacagatttgatccagcgatacagcgcgtcgtgattagcgccgtggccactttcattccccaggctccagatgatcacactcgggtgattacgatcgcgctgcaccattcgcgttacgcgttcgctcatcgccggtagccagcgcggatcatcggtcagacgattcattggcaccatgccgtgggtttcaatattggcttcatccaccacatacaggccgtagcggtcgcacagcgtgtaccacagcggatggttcggataatggctacagcgcacggcgttaaagttgttctgcttcatcagcaggatatcctgcaccatcgtctgctcatccatgacctgaccatgcagaggatgatgctcgtgacggttaacgcctcgaatcagcaacggcttgccgttcagcagcagcagaccattttcaatccgcacctcgcggaaaccgacatcgcaggcttctgcttcaatcagcgtgccgtcggcggtgtgcagttcaaccaccgcacgatagagattcgggatttcggcgctccacagtttcgggttttcgacgttcagacgtagtgtgacgcgatcggcataaccaccacgctcatcgataatttcaccgccgaaaggcgcggtgccgctggcgacctgcgtttcaccctgccataaagaaactgttacccgtaggtagtcacgcaactcgccgcacatctgaacttcagcctccagtacagcgcggctgaaatcatcattaaagcgagtggcaacatggaaatcgctgatttgtgtagtcggtttatgcagcaagctgacgtcacggaaaatgccgctcatccgccacatatcctgatcttccagataactgccgtcactccagcgcagcaccatcaccgcgaggcggttttctccggcgcgtaaaaatgcgctcaggtcaaattcagacggcaaacgactgtcctggccgtaaccgacccagcgcccgttgcaccacagatgaaacgcgctgttaacgccatcaaaaataattcgcgtctggccttcctgtagccagctttcatcaacattaaatgtgaggctgtaacaacccgtcggattctccgtgggaacaaacggcggattgaccgtaatgggataggtcacgttggtgtagatgggcgcatcgtaaccgtgcatctgccagttactggggacgacgacagtatcggcctcaggaagatcgcactccagccagctttccggcaccgcttctggtgccggaaaccaggcaaagcgccattcgccattcaggctgcgcaactgttgggaagggcgatcggtgcgggcctcttcgctattacgccagctggcgaaagggggatgtgctgcaaggcgattaagttgggtaacgccagggttttcccagtcacgacgttgtaaaacgacggccagactatccgtaatcatggtcatagctgtttcctgtgtgaaattgttatccgctcacaattccacacaacatacgagccggaagcataaagtgtaaagcctggggtgcctaatgagtgagctaactcacattaattgcgttgcgctcactgcccgctttccagtcgggaaacctgtcgtgccagctgcattaaactatcggccaacgcgcggggagaggcggtttgcgtattgggcgccagggtggtttttcttttcaccagactgacgggcaacagctgattgcccttcaccgcctggccctgagagagttgcagcaagcggtccacgctggtttgccccagcaggcgaaaatcctgtttgatggtggttaacggcgggatataacaactgctgtcttcggtatcgtcgtatcccactacgctgatatccgcaccaacgcgcagcccggactcggtaatggcgcgcattgcgcccagcgccatctgatcgttggcaaccagcatcgcagtgggaacgatgccctcattcagcatttgcatggtttgttgaaaaccggacatggcactccagtcgccttcccgttccgctatcggctgaatttgattgcgagtgagatatttatgccagccagccagacgcagacgcgcgctgacagaacttaatgggcccgctaacagcgcgatttgctggtgacccaatgcgaccagatgctccacgcccagtcgcgtaccgtcttcatgggagaaaataatactgttgatgggtgtctggtcagagacatcaagaaataacgccggaacattagtgcaggcagcttccacagcaatggcatcctggtcatccagcggatagttaatgatcagcccactgacgcgttgcgcgagaagattgtgcaccgccgctttacaggcttcgacgccgcttcgttctaccatgctcaccaccacgctggcacccagttgatcggcgcgagatttaatcgccgcgacaatttggctcggcgcgtgcagggccagactggaggtggcaacgccaatcagcaagctctgtttgcccgccagttgttgtgccacgcggttgggaatgtaattcagctccgccatcgccgcttccactttttcccgcgttttcgcagaaacgtggctggcctggttcaccacgcgggaaacggtctgataagagacaccggcatactctgcgacatcgtataacgttactggtttcacattcaccaccctgaattgactctcttccgggcgctatcatgccataccgcgaaaggttttgcgccattcgatggtgtcaacgtaaatgcatgccgcttcgccttccggccaccagaatagcctggctttcaaccccttcttcgatctgttttgctacccgttgtagcgccggaagatgcttttccgctgcctgttcaatggtcattgcgctcgccatatacaccagattcagacagccaatcacccgttgttcactgcgcagcggtacggcgatagaggcgatcttctcctcctgatcccagccgcggtagttctgtccgtaaccctctttgcgcgcgcgcgccagaatggcttccagctttaacggttcccgtgccagttgatagtcatcaccggggcgggaggctaacatttcgattaattccttgcggtcttgttccgggcaaaaggccagccaggtcaggccgctggcggttttcagaagcggcaaacgtcgcccgaccattgcccggtgaaaggataagcggctgaaacggtgagtggtttcgcgtaccaccattgcatcaacatccagcgtggacacatctgtcggccataccacttcgcgcaacagatcgcccagcagtggggccgccagtgcagaaatccactgttcgtcacgaaatccttcgcttaattgccgcactttgatggtcagtcgaaaactatcatcggaggggctacggcggacatatccctcttcctgcagcgtctccagcagtcgccgcacagtggtgcgatgcaggccgctgagttccgccagcagcccgacgctggcaccgccatcaagtttatttaacatatttaataacattagaccgcgggttaagccgcgcacggttttgtattccgtctgctcattgttctgcatattaatactcatttctatagttaaaacaacgtggtgcacctggtgcacattcgggcatgttttgattgtagcgctaaacacccttcctatactgagcgcacaataaaaaatcatttacatgtttttaacaaaataagttgcgctgtactgtgcgcgcaacgacattttgtccgagtcgtgaggtactgaaatggcaatacaacaccctgacatccagcctgctgttaaccatagcgttcaggtggcgatcgctggtgccggcccggttgggctgatgatggcgaactatctcggccagatgggcattgacgtgctggtggtggagaaactcgataagttgatcgactacccgcgtgcgattggtattgatgacgaggcgctgcgcaccatgcagagcgtcggcctggtcgatgatgttctgccgcacactacgccgtggcacgcgatgcgttttctcaccccgaaaggccgctgttttgctgatattcagccaatgaccgatgaatttggctggccgcgccgtaacgcctttattcagccgcaggtcgatgcggtgatgctggaaggggtgagccgttttccgaatgtgcgctgcttgttttcccgcgagctggaggccttcagtcagcaagatgacgaagtgaccttgcacctgaaaacggcagaagggcagcgggaaatagtcaaagcccagtggctggtagcctgtgacggtggagcaagttttgtccgtcgcactctgaatgtgccgtttgaaggtaaaactgcgccaaatcagtggattgtggtagatatcgccaacgatccgttaagtacgccgcatatctatttgtgttgcgatccggtgcgcccgtatgtttctgccgcgctgcctcatgcggtacgtcgctttgaatttatggtgatgccgggagaaaccgaagagcagctgcgtgagccgcaaaatatgcgcaagctgttaagcaaagtgctgcctaatccggacaatgttgaattgattcgccagcgtgtctacacccacaacgcgcgactggcgcaacgtttccgtattgatcgcgtactgctggcgggcgatgccgcgcacatcatgccggtatggcaggggcagggctataacagtggtatgcgcgacgcctttaacctcgcatggaaactggcgttggttatccaggggaaagcccgcgatgcgctgctcgatacctatcaacaagaacgtcgcgatcacgccaaagcgatgattgacctgtccgtgacggcgggcaacgtgctggctccgccgaaacgctggcagggtacgttacgtgacggcgtttcctggctgttgaattatctgccgccagtaaaacgctacttcctcgaaatgcgcttcaagccgatgccgcaatattacggcggtgcgctgatgcgtgagggcgaagcgaagcactctccggtcggcaagatgtttattcagccgaaagtcacgctggaaaacggcgacgtgacgctgctcgataacgcgatcggcgcgaacttcgcggtaattggctggggatgcaatccactgtgggggatgagcgacgagcaaatccagcagtggcgcgcgttgggcacacgcttcattcaggtggtgccggaagtgcaaattcataccgcacaggataaccacgacggcgtactacgcgtgggcgatacgcaaggtcgcctgcgtagctggttcgcgcaacacaatgctagcctggtggtgatgcgcccggatcgctttgttgccgccaccgccattccgcaaaccctgggcaagaccctgaataaactggcgagcgtgatgacgctgacccgccctgatgccgacgttcctgtcgaaaaggtagcctgatatgcacgcttatcttcactgtctttcccacagcccgctggtggggtatgtcgacccggcgcaagaggtgctcgatgaggtcaatggcgtgattgccagcgcccgcgagcgtattgcggcattctcccctgaactggtggtgctgtttgcgccagatcactacaacggctttttctatgacgtgatgccaccgttctgtttaggcgttggagcgacggcaattggtgatttcggcagtgcggcaggagagctgcccgtgcctgtggagctggcggaggcctgtgcgcatgccgtcatgaagagcgggatcgatcttgccgtttcttactgtatgcaggtggaccacgggttcgcccagccgctggagttcctgctcggtgggctggataaggtgccagttctgcctgtgttcatcaacggtgtcgccacgccgctgcccggtttccagcgtacccgcatgttgggtgaagccattggacgtttcaccagcactctcaataaacgcgtgctgttcctgggttccggtgggctttcccatcagccgccggtgcccgaactggcgaaagccgatgcccatatgcgcgaccgtctgttggggagcgggaaagatttacccgccagtgagcgcgaattgcgtcagcaacgggtgattagcgccgctgagaagtttgttgaggatcagagaacgctgcatccgctcaacccgatttgggataaccagttcatgactttgctggagcagggacgcatacaggaactggatgccgtcagtaacgaagagctttccgccattgccggaaagagcacacatgaaatcaaaacctgggtcgccgcttttgccgctatttctgcgtttggcaactggcgtagcgaagggcgttattaccgcccaatcccggagtggattgccggatttggcagcttaagcgccagaacagagaactgaatatgcaggagaagatgatgagttatcagccacaaaccgaagccgccaccagccgttttctgaatgtagaagaagcgggtaaaacgctgcgcatccattttaatgactgcggacaaggcgacgaaaccgttgtcctgctgcatggttccggcccgggtgctactggctgggcgaacttcagccgcaatatcgatccgctggtagaggcgggctatcgggtgatcctgctggattgtccgggttggggcaagagcgatagcgtcgttaatagtggtagccgaagcgatcttaatgcacgaatcctgaaaagcgtggtggatcaactggatatcgccaaaatccacctgctgggcaacagcatggggggccatagttctgtggcgttcacccttaaatggccggagcgcgtcggcaaactggtgctgatgggcggcggtacgggcggcatgagtttgtttacgccgatgccaaccgaaggtattaagcgactgaatcagctttatcgtcagccgactatcgaaaacctgaagctgatgatggatatcttcgtttttgataccagcgatttgaccgacgccctgtttgaagcgcgcctgaataatatgctgagccgccgcgatcacctggaaaacttcgttaagagcctggaagctaatccgaaacagttcccggattttggcccacgtctggcggaaatcaaagcgcaaaccctgattgtctgggggcgcaacgaccgctttgtgccgatggatgcgggtctgcgtctgctgtccggcattgccggttctgaactgcatatcttccgcgactgtggtcactgggcgcagtgggaacatgccgacgctttcaatcaactggtgctgaatttcctcgcacgcccttaaggaatggtcatgacgaagcatactcttgagcaactggcggcggatttacgccgcgccgcagagcagggcgaagcgattgcaccgctgcgcgatctgattggtatcgataacgctgaagcggcttacgccattcagcacataaatgtgcaacatgacgttgcgcaggggcgtcgcgtggtagggcgtaaagtgggcctgacacatccgaaagtgcaacaacaactgggcgttgatcaaccggattttgggacgttatttgccgacatgtgttatggcgataacgaaatcattcctttttcccgtgttctgcaaccccgcattgaagcggagatcgcactggtgttgaaccgcgatttgcccgcaaccgatatcaccttcgacgaattgtataacgccattgaatgggtacttccggcgctggaagtggtggggagccgcattcgcgactggagcattcagtttgtcgataccgtggcagataacgcctcctgtggggtgtatgtcatcggcggtccggcgcaacgtccggcggggttagacctgaaaaactgcgccatgaagatgacgcgtaataacgaagaggtttctagcgggcgcggcagcgaatgcctgggacatccgcttaatgcggccgtctggctggcacgcaaaatggccagtctgggtgaaccgctgcgcaccggagatatcattcttaccggggcattaggtccgatggtggcggtgaatgcgggcgatcgttttgaagcccatattgaaggcataggtagtgttgctgcgacatttagtagcgcagccccaaaaggaagtctgagttgagctaagccccaaaaggaagtctgtcatgagtaagcgtaaagtcgccattatcggttctggcaacattggtaccgatctgatgattaaaattttgcgtcacggtcagcatctggagatggcggtgatggttggcattgatcctcagtccgacggtctggcgcgcgccagacgtatgggcgtcgccaccacccatgaaggggtgatcggactgatgaacatgcctgaatttgctgatatcgacattgtatttgatgcgaccagcgccggtgctcatgtgaaaaacgatgccgctttacgcgaagcgaagccggatattcgcttaattgacctgacgcctgctgccatcggcccttactgcgtgccggtggttaacctcgaggcgaacgtcgatcaactgaacgtcaacatggtcacctgcggcggccaggccaccattccaatggtggcggcagttagtcgcgtggcgcgtgttcattacgccgaaattatcgcttctatcgccagtaaatctgccggacctggcacgcgtgccaatatcgatgaatttacggaaaccacttcccgagccattgaagtggtgggcggcgcggcaaaagggaaggcgattattgtgcttaacccagcagagccaccgttgatgatgcgtgacacggtgtatgtattgagcgacgaagctagtcaagatgatatcgaagccagtatcaatgaaatggctgaggcggtgcaggcttacgtaccgggttatcgcctgaaacagcgcgtgcagtttgaagttatcccgcaggataaaccggtcaatttaccgggcgtggggcaattctccggactgaaaacagcggtctggctggaagtcgaaggcgcagcgcattatctgcctgcctatgcgggcaacctcgacattatgacttccagtgcgctggcgacagcggaaaaaatggcccagagtctggcgcgcaaggcaggagaagcggcatgaacggtaaaaaactttatatcagcgacgtcacattgcgtgacggtatgcacgccattcgtcatcagtatagcctggaaaacgttcgccagattgccaaagcactggacgatgcccgcgtggatagcattgaagtggcccacggcgacggtttgcaaggttccagctttaactatggtttcggcgcacatagcgaccttgaatggattgaagcggcggcggatgtggtgaagcacgccaaaatcgcgacgttgttgctgccaggaatcggcactattcacgatctgaaaaatgcctggcaggctggcgcgcgggtggttcgtgtggcaacgcactgtaccgaagctgatgtttccgcccagcatattcagtatgcccgcgagctcggaatggacaccgttggttttctgatgatgagccatatgaccacgccggagaatctcgccaagcaggcaaagctgatggaaggctacggtgcgacctgtatttatgtggtggattctggcggtgcgatgaacatgagcgatatccgtgaccgtttccgcgccctgaaagcagagctgaaaccagaaacgcaaactggcatgcacgctcaccataacctgagtcttggcgtggcgaactctatcgcggcggtggaagagggctgcgaccgaatcgacgccagcctcgcgggaatgggcgcgggcgcaggtaacgcaccgctggaagtgtttattgccgccgcggataaactgggctggcagcatgggaccgatctctatgcgttaatggatgccgccgacgacctggtgcgtccgttgcaggatcgaccggtacgagtcgatcgcgaaacgctggcgctgggatacgctggtgtttacagcagcttcctgcgtcactgtgaaacggcggcggcgcgttatggcttaagtgcggtggatattctcgttgagctgggcaaacgccggatggttggcggccaggaggatatgatcgttgacgtggcgctggatctgcgcaacaacaaataatgatgactgccgagaacgtgcattttgtatgcccatcccagcacgactgccggatgcggcgtgaacgccttatccggcctacggatggcgtgagaatttgtaggtctgataagacgcgttagcgtcgcatcaggcatctgcgcacgactgccggatgcggcgtgaacgccttatccggcctacggatggcgcgggaatttgtaggcctgataagacgcgttagcgtcgcatcaggcatctgcgcacgactgccggatgcggcgtgaacgccttatccggcctacgggtggcgcgagaatttgtaggcctgataagacgcgttagcgtcgcatcaggcatctgcgcacgactgccggatgcggcgtaaacgccttatccggcctacggatggcgcgggaatttgtaggcctgataagacgcgttagcgtcgcatcaggcatctgcacacgactgccggatgcgataaacgtcttgtccggcctacatttcgcccgtaggcagtcattaaatagttctgattacgcggctggcaatgtatcagtcgcgattcacctgcactcgcaacgaggttcatcttatgagcactcgtacccctagtagttctagttcccgcctgatgctgaccatcgggctttgttttttggtcgctctgatggaagggctggatcttcaggcggctggcattgcggcgggtggcatcgcccaggctttcgcactcgataaaatgcaaatgggctggatatttagcgccggaatactcggtttgctacccggcgcgttggttggcggaatgctggcggaccgttatggtcgcaagcgcattttgattggcagtgttgcgctgtttggtttgttcagtctggcaacggcgattgcctgggatttccccagtctggtctttgcgcggctgatgaccggtgtcgggctgggggcggcgttgccgaatcttatcgccctgacgtctgaagccgcgggtccacgttttcgtgggacggcagtgagcctgatgtattgcggtgttcccattggcgcggcgctggcggcgacactgggtttcgcgggggcaaacttagcatggcaaacggtgttttgggtaggtggtgtggtgccgttgattctggtgccgctattaatgcgctggctgccggagagcgcggttttcgctggcgaaaaacagtctgcgccaccactgcgtgccttatttgcgccagaaacggcaaccgcgacgctgctgctgtggttgtgttatttcttcactctgctggtggtctacatgttgatcaactggctaccgctacttttggtggagcaaggattccagccaagccaggcggcaggggtgatgtttgccctgcaaatgggggcggcaagcgggacgttaatgttgggcgcattgatggataagctgcgtccagtaaccatgagcctactgatttatagcggcatgttagctagcctgctggcgcttggaacggtgagcagttttaacggtatgttgctggcgggatttgtcgcggggttgtttgcgacaggtgggcaaagcgttttgtatgccctggcaccgttgttttacagtagccagatccgcgcaacaggtgtgggaacagccgtggcggtagggcgtctgggggctatgagcggtccgttactggccgggaaaatgctggcattaggcactggcacggtcggcgtaatggccgcttctgcaccgggtattcttgttgctgggttggcggtgtttattttgatgagccggagaagtcgaatacagccgtgcgccgatgcctgacgtgccttattaggcaggggcgaaagggacttcaccccaatacacctacggcgtttacaggtatactcgctaaaaattattcagcgggtttggaaacaaagatggcaaaacttaccttacaagagcagttgctcaaagcaggattagtcaccagcaaaaaagcggcgaaggtggagagaacggcgaaaaaaagccgcgttcaggcgcgtgaagctcgggcggcggtagaagaaaataaaaaggcacagcttgagcgtgataaacagcttagcgaacagcaaaaacaagcggcgttggcgaaagaatataaagctcaggtgaagcagcttattgaaatgaaccgaatcaccattgccaatggcgatattggttttaacttcactgacggcaatctgattaagaagatttttgtcgataagctcacacaggcgcagttgattaatggtcgtctggcgattgcccgcttgttggtcgataacaatagcgaaggtgaatacgccattattcccgccagcgttgccgataaaattgctcagcgcgatgccagcagtatagcgttgcacagcgcgctcagcgccgaagagcaggatgaagacgacccgtatgccgacttcaaagtgcctgatgatttgatgtggtaaacatagataagtcgtgcgcagatgcctgatgcgacgctatgcgcgtcttatcaggcctacggtttatgggcgaagtgtagaccggataaggcgttcacgccgcatccggcagtcgtgcgccatgcctgatgcgacgctttgcgcgtcttatcaggcctacggcttacgggcgaagtgtaggccggataaggcgttcacgccgcatccggcagtcgtgctattatcaacgcatattcagtttattggcgtggtaggcaatatgctcgccaataaaactggagacaaaataatagctgtgatcataaccctcgtgataacggattaacgtcttgatattcatctcctggcagatcttttcaagatttggagtccgcagctgttctgcgtaaaaatcatcactcaacccctgatcaaccatgatttccgcaacgcgttgaccttgactaataagactcaccgggtcgtaatccaaccaggcatctttattttcagcaagatatgcagcaaaggcttgctgtccccacggcacttggcttggggagacaatggggctaaacgcgctgacgctgacatattcatctgggttacgtaacgccagcaccagcgcgcccagcccgcccatagaatgaccagagatagactttttggccgttgccggaaaatgatgcatcactaaatccggcagctcgttgcggatatagtcatacattttgtaatgttcattccacggcgcttgcgtcgcgttcaggtaaaacccggcaccttgcccgagatcgtaacggtcagcatctgcgacatgactgcctcgcggactggtgtccggcgcaacaacaataatgttgtgctcagccgcgtaacgctgcatcccgcttttagtaatgaaattctgctcgttgcaggtcaggccactaagccagtacagcaccggcaatttttcattcgcggcttttggtgggagatagacgccgacattcatttcacatttcagactttgggaataatgccgatacatattttgccagccgccaaagctgacatgtttttcaatgagttccatcagtcattatctcagggttaatcccccggacggctgcccggggagagtattaagaacccccgcctgaagtggacggggtaaacctgcgggaaatcagtaacgaattacggttcgaatggatttgccttcatgcatcaggtcgaaggcgtcattaatttcatccaggctcatggtatgcgtgacaaacggttccagatcgatatcacctttcatcgcatcttcaaccatgcccggtaactgggaacgacctttcacgccgccaaacgcggaacctttccatacgcgaccagtgaccaactggaatggacgggtggagatttcctgaccggcaaccgcgaccccgatgatcacgctctgaccccagccgcggtgcgcactttccagcgccgcacgcatcacgttgacgttaccgatgcattcaaaggtatggtcgataccccatttgttgatatccaacaggacatcttttatcggtttgtcgtagtcattcgggttaatgcagtcggtagcaccgaagcgacgcgccagatcgaatttcttcgggttggtatcgatagcgataatccgacccgctttcgcctgacgcgcgccctgaaccactgccagaccaatcgcgccaagaccaaacacggcaacagaatcacctggctggactttagctgtgttgtgtaccgcgccaataccggtggtcacgccacagcccagcaggcagacgtgttcatggtttgcttctggattaatttttgccagagacacttccgcgactacggtgtattcactgaatgtagagcaccccatgtagtgataaagcggctgcccgttgtaagaaaaacgggtggtgccgtctggcatcaggcctttaccctgggtttcgcgaaccgcaacacagaggttagttttgccagaacgacagaactcacactcgccgcactccgcggtgtaaagcgggatcacatggtcgccaggtttgacgctggttacgccttcaccgacttcaaccacaacgccggccccttcgtgaccgagaaccaccgggaatacaccttccgggtcatcgccggagagggtaaatgcgtcggtatggcaaacgccggtatgggtgactttaattagcacttcaccttttttcggtggtgcaacgtcaatttcaacgatttccagcggtttaccgggagcaaatgcaacggcagcacgacttttcatctctcgctcttcctcaatatggtaatagattcagttatttaagataggcacgaaccagttcaatagtgtcgtcaacggattggctgacttcgcggctgtagcagtcatttcggtcaaacgtttcccggatatggctttcaagcacttctgccatcagcccattagccgcgccccgaacggcagcgatctgttggagtatggcacggcattcggcatcaccctccaggctccgttccagagcatcaatctgcccccgaatacgacgaactcgagtaaggacctttttcttctcttccggagtactgggcatttcgcacctcatcatctgcatgcaatatactataggggggtattctatatgtcaatgcatacccccctatagtatataacactggagaataaaatttatccggtgaatgtggtcggaaaacaaagaggaaaggggggggctaatcggcagggaaggccgccccggatagcgggcggcagaaggaatcagaatttccaggtcagacgggctgcaagttgcagaccgttacgagatggacggtcccctcgcccccttggggagagggttagggtgagggggcgttcaccgtactttcaacaggttaactccccctttctgagaggaaacaaaattaacgcagaatcttcttctcagccaaatccagcgcaaagtagctgaaaatcagatccgcacccgcacgcttaatgctacctaagctttcgagcacgactttctcttcatctatagcacccgccagcgcggcgaacttaatcatcgcatactcaccgctcacctgatacgcgccaatcggcaattcagtacgttcacgcagctcacgcacgatgtcgaggtacgctccagcaggtttaaccatcaggcagtctgcgccctgggcttcatccagcagactttcacgaatcgcctcacgacggttcattgggttcatctgatagcttttgcggtcgccttttaatgcgcttccggcagcttcacggaacgggccataaaaggaggaggcgaacttggtgctatagctcataatcgccgtatctttaaatcccgcagcgtccagcgcctgacgaatcgcctgtacctggccgtccatcgcggcggaaggggcgatgaagtctgcacctgcagcagctgcaaccacggcttgcttgcctaaattttccagagtcgcgtcgttgtcgacgccatgctcgcacagcacaccgcagtgaccgtgagaagtgtattcacagaagcaggtgtcactcataacgatcatttctggcacggtctgcttgcagatgcggctcatacgcgccaccagtccatcttcccgccaggcatcgctgccggtttcatcggtatggtgagagatgccaaaagtcatcacggaacgaataccggcgttggcgatgcgttcaatttcgcgtgccagatgtttctctggaatgcgcatcacgcctggcatggcttcaacggctttgtagtcgtcaatttcttcttcaacaaagatcggcaacaccaggtcgttaaggctaagtgttgtctcttcaaacatagcgcgcagcgcaggagatttgcgcaggcgacgagggcgttggattaagtctgtcatggtctgcctgatgtttgtggaatcgaggggcatagtatacctgaagcagggtagggatgttttacgaaagttgtcgcgatgttgacaagaagagaatggaagagaggccaggacatctttttaatagaaacagcaataattttatattcactgaaaatatttttaatcttgaatattatcgggcgttaaaatattacattgtggttttcaatgcgttatccgcagcgtgacgctccagcgccagttcaatcaaacgtgtgatcagatcggtgtaacccagaccgctggcttgccacagcttcggatacatactgatattagtgaagccaggcagggtgttgatctcgttgatcaccacttcgttctctggggttaaaaacacgtctacacgcgccatgcctgcgcatcccaacgtttgataagcctgaacggcaatcgcccggatcttatcgttgatttctggcgcaatggctgccggaactaccactttcgcgccatcttcgtcaatgtacttggtgtcgtaggcatagaaatcgctggtgagtacgatctctccacaggtgctggcttgcggattgtcgttgcccagaactgcgcattcgatctcacgacctttgatcccttgctcaacgatcactttatgatcgaactcgaacgccagatcgacggcaattgcgtactgttcttcactggttactttgctgacaccaacagaagagccctgattagccggttttacaaacagtggtaaccccagtttagactccacttcggcaaaactaatgttgtgacgattggcgcgcgtcagggtaataaatggcgcaatgttcagcccggcatcgcgtagcagacgtttggtgacatctttgtccatacaggctgcactagccagaacatcagaacctacaaacggtaaattggcgacccgcagcattccctgcaaggaaccatcttcgcccagcgtaccgtggacaatcgggaaaatgacatccaccgtcggcaacggctgaccgttttgcgcgtcgataagctgatgctcatgtttacctggcacctgcgcaaggctggtcgcgctagggcgcaacgcaatatgggcaggatcgtctgcatttagcagataattgctggcatcgctgacgtgccattgcccttgtttatcaatgcccagcagcacaacgtcgaagcgacttttatcaatggcatcgacaatgttttttgcgctttgcagagacacttcatgttccgcacttttaccaccaaaaacgattcctacccgcagtttttccatcttaaaaacctatcccgtctaacacaaagtgcatacattaccacgacaaaacgggggattcgcggccttctgaaagattgttgcaatcttctgctgacaaagcgtgcaacgtactggtgaagaaagtgcgttatctcaaagatgtgcgcaagatcacaaaaatgatgaacgggaagctaatttattcctggcttaaatggccatgcggtgagtttttttctcttaattataagttaacgaagagaatatatttcataacttttatttataataaaggttgataattaaaagcctatattttgtgtgggtaattatttaaataagagaaacgtttcgctggtaatcaaacaaaaaatatttgcgcaaagtatttcctttgtcataaaaataatacttccagacactatgaagttgtgaaacataatgttaacttctccatactttggataaggaaatacagacatgaaaaatctcattgctgagttgttatttaagcttgcccaaaaagaagaagagagcaaagaactgtgtgcgcaggtagaagctttggagattatcgtcactgcaatgcttcgcaatatggcgcaaaatgaccaacagcggttgattgatcaggtagagggggcgctgtacgaggtaaagcccgatgccagcattcctgacgacgatacggagctgctgcgcgattacgtaaagaagttattgaagcatcctcgtcagtaaaaagttaatcttttcaacagctgtcataaagttgtcacggccgagacttatagtcgctttgtttttattttttaatgtatttgtacatggagaaaataaagtgaaacaaagcactattgcactggcactcttaccgttactgtttacccctgtgacaaaagcccggacaccagaaatgcctgttctggaaaaccgggctgctcagggcgatattactgcacccggcggtgctcgccgtttaacgggtgatcagactgccgctctgcgtgattctcttagcgataaacctgcaaaaaatattattttgctgattggcgatgggatgggggacagcgaaattactgccgcacgtaattatgccgaaggtgcgggcggcttttttaaaggtatagatgccttaccgcttaccgggcaatacactcactatgcgctgaataaaaaaaccggcaaaccggactacgtcaccgacagcgctgcaagtgcaaccgcctggagtaccggtgtcaaaacctataacggcgcgctgggcgtcgatattcacgaaaaagatcacccaacgattctggaaatggcaaaagccgcaggtctggcgaccggtaacgtttctaccgcagagttgcaggatgccacgcccgctgcgctggtggcacatgtgaccagccgcaaatgctacggtccgagcgcgaccagtgaaaaatgtccgggtaacgctctggaaaaaggcggaaaaggaagcattaccgaacagctgcttaacgctcgtgccgacgttacgcttggcggcggcgcaaaaacctttgctgaaacggcaaccgctggtgaatggcagggaaaaacgctgcgtgaacaggcacaggcgcgtggttatcagttggtgagcgatgctgccagtctgaatagcgtgacggaagcgaatcagcaaaaacccctgcttggcctgtttgctgacggcaatatgccagtgcgctggctaggaccgaaagcaacgtaccatggcaatatcgataagcccgcagtcacctgtacgccaaatccgcaacgtaatgacagtgtaccaaccctggcgcagatgaccgacaaagccattgaattgttgagtaaaaatgagaaaggctttttcctgcaagttgaaggtgcgagtatcgataaacaggatcatgctgcgaatccttgtgggcaaattggcgagacggtcgatctcgatgaagccgtacaacgggcgctggaattcgctaaaaaggagggtaacacgctggtcatagtcaccgctgatcacgcccacgccagccagattgttgcgccggataccaaagctccgggcctcacccaggcgctaaataccaaagatggcgcagtgatggtgatgagttacgggaactccgaagaggatagtcaagaacataccggcagtcagttgcgtattgcggcgtatggcccgcatgccgccaatgttgttggactgaccgaccagaccgatctcttctacaccatgaaagccgctctggggctgaaataaaaccgcgcccggcagtgaattttcgctgccgggtggtttttttgctgttagcaaccagacttaatggcagatcacgggcgcatacgctcatggttaaaacatgaagagggatggtgctatgaaaataacattactggttaccttgcttttcggtctggtttttttaaccaccgtcggcgctgccgagagaactttaaccccacaacaacagcgtatgacctcctgtaatcagcaggcgacggcgcaggcgttgaaaggggatgctcgtaagacctacatgagtgattgcctgaagaacagcaagtctgcgcctggcgaaaaaagtttgacgccacagcagcaaaagatgcgcgaatgcaataatcaagcaacacaacaatctctgaaaggtgatgatcgtaataagtttatgagtgcctgcctcaagaaagccgcctgatacctgatagtgctaacgggtgagctacgaaaatggctcacccgaaatatcatacttctgcctttagctccgtctctataatttgggaaaattgtttctgaatgttcccaaaaataatgaatgatgaaaactttttcaaaaaagcggcggcgcacggggaggaacctcctttaactcctcaaaacgaacatcagcggtccgggctgcgcttcgcccgtcgcgtcagactaccccgtgcggttggcctggctggcatgttcttaccgattgctagtacgctggttagtcacccgccgccgggctggtggtggctggtgttggtcggctgggcgttcgtctggccgcatttagcctggcagatagcgagcagggccgtcgatccgcttagccgggaaatttacaacttaaaaaccgatgcagtattagcgggaatgtgggtaggcgtaatgggcgtaaacgtgctgccttccaccgcgatgttgatgattatgtgtctgaatttgatgggggcaggcggcccccgtctgtttgtcgcgggtctggtgttgatggtggtttcctgccttgtcaccctcgagctgacgggcattaccgtgagcttcaatagtgcgccgctggaatggtggctctcccttcccattattgtcatttatcctctgctgtttggctgggtcagctaccagacggcaaccaaactggcggaacataaacgcaggttgcaggtcatgagtacccgcgacggcatgacgggcgtgtataaccgacgtcattgggaaactatgttacgcaatgaatttgataactgtcggcggcataatcgcgatgcaacgttactgattatcgatatcgaccatttcaagagcatcaacgatacctggggccatgatgtgggcgatgaagcgattgtggcgcttacccgacagttacaaattgccctgcgcggtagcgatgtgattggtcggtttggcggcgatgagtttgcagtaatcatgtccggtacgccagctgagagcgccattaccgccatgttacgggtgcatgaagggctaaatacattacgtttgccgaatacgccacaggtaactttacggattagtgtgggggttgcgccgctgaacccacaaatgagtcactatcgtgagtggttgaaaagcgcagatttggcgctttacaaagcaaagaaagccggacgtaaccgcaccgaagtggcggcctgacgtccggcgaaagtcatcaggatttgctgagtttttcacttttttccatacacttcgtcatcgcttcgatcactgcagcacggaagcctttctcttccagtacgcgtaccgcttcaatggtggtgcctcccggactgcagaccatatctttcagtgcccccggatgttctcccgtttccagcaccatttttgcggaacccattaccgcctgagcggcaaatttatacgcctgggcgcgtggcatcccgcccagcacggcggcgtcggccatcgcttcgataaacataaatacgtaggctgggctagaaccgctcacaccgaccaccgggtggatcatcggctcagcaattacttccgcttcgccaaagcagcggaaaatattcagcacatcagcggtatcttctggggttaccagcgcgtttggcgttacggaggtcatcccggcattaaccagtgcgggagtgttcggcatggcgcggataattttccggtcatggcccagcgcgcgggcaagctggtcgagcgtgacacctgcagcaatagaaacgaccagagagtctttattcaggctggaggtgatttcgctaagcactttaatcatgatgccaggtttaacggcagcaaaaatgatgtcggcgatttgcgccacttcttgcgcgctttctgcggcgttgatgccgaactggtcatgcagggcggcgactttatccggggagggggtgtatacccagatttgccctggaagcacctgaccgctggcaatcagaccgccgagaatggcttttcccatattgccgcagccaataaaaccgattttcttttccattgcctcactcctgccgtgaaattcattgttttgataatcgctggcagaagcataaacagaactatgccggaaggcaaaagcgcgacacaatagaggattacccaacaaaggatgactttatgacaatttgggtggatgccgacgcgtgtcccaatgtaattaaagagattttgtatcgcgcggcggaacgtatgcagatgccgctggtactggtagcaaaccagagtttacgcgtgccgccaagccgatttattcgtacgctgcgcgtcgcggcaggtttcgacgttgccgataacgaaattgtccggcagtgtgaagcgggcgatttggtgatcaccgcagatatacctttggctgctgaagccatcgagaaaggcgctgcggcgcttaatccgcgcggcgaacgttacacgccagcgaccattcgtgagcgcctgacgatgcgcgattttatggataccttacgtgccagtgggatccagaccggcggaccagatagccttagtcaacgtgaccgccaggcctttgccgcggagctggagaagtggtggctggaagtgcaacgtagtcgtggctaaatgtaatttattatttacacttcattcttgaatatttattggtatagtaaggggtgtattgagattttcactttaagtggaattttttctttacaatcgaaattgtactagtttgatggtatgatcgctattctcatgacaccggctttcgccgcattgcgacctattggggaaaacccacgatgacacaacctctttttctgatcgggcctcggggctgtggtaaaacaacggtcggaatggcccttgccgatagccttaaccgtcggtttgtcgataccgatcagtggttgcaaagtcagctcaatatgacggtcgcggagatcgtcgaaagggaagagtgggcgggatttcgcgccagagaaacggcggcgctggaagcggtaactgcgccatccaccgttatcgctacaggcggcggcattattctgacggaatttaatcgtcacttcatgcaaaataacgggatcgtggtttatttgtgtgcgccagtaagtgtcctggttaaccgactgcaagctgcaccggaagaagatttacggccaaccttaacgggaaaaccgctgagcgaagaagttcaggaagtgctggaagaacgcgatgcgctatatcgcgaagttgcgcatattatcatcgacgcaacaaacgaacccagccaggtgatttctgaaattcgcagcgccctggcacagacgatcaattgttgattttcgagcgcctatacttaacgttcatcccgtgaaataaggaagaacgatgccaacgaaaccgccttatcctcgtgaagcatatatagtgacgattgaaaaaggaaagccaggacagacggtaacctggtaccaactcagagccgatcatcctaaaccagacagcttgatcagtgaacatccgaccgctcaggaagcgatggatgcgaaaaaacgctatgaggaccctgacaaagagtgaccgcatcagactgctcggaagggattctgagtgccactacaagggatctgcgtcacatttttcataattcatgtttttctaataattagaatattaaacaataacaatccattactggaatcatttggaatctttacattatgccgtgcacgtctgctgctacgctttttgtcatttgtagcacaagtaagtgtcagcagtggtgcttcacacttgcccggtaattaacgacgaaagaaaagtaaggtggatgaacaatgagtgcgagcttggcgatcctgaccatcggcattgtacctatgcaggaagttttgccgctcctgacggaatacattgacgaagataatatttcccatcatagcctgctggggaagttaagtcgtgaagaagtgatggcggagtacgcgccagaagcaggcgaagacaccattctcacattattaaatgacaaccagctggcccatgttagccgtcgcaaagtggagcgtgacctgcaaggtgtggttgaagtgctcgataatcagggttatgacgtcattttattaatgagtacagcaaacattagtagtatgactgcgcgtaatacgatctttcttgagccgagccgaatattgcctccactggtttcctctattgttgaagatcatcaggtgggggttatcgttccggttgaggagatgctgcccgttcaggcgcaaaaatggcaaattttgcagaaaagcccggtatttagtttgggtaaccccattcatgatagtgaacaaaaaatcattgatgccgggaaagaattactggcaaaaggggctgatgtcatcatgctggattgtttaggatttcaccaacgtcatcgcgatttactgcaaaaacagctcgatgttcctgtcttgctgtctaacgtattgattgcacggctggctgcggaattactggtgtaattttgcgtgacagccagcgcctctggcccctatagtgaagtagatgttcaactaccaaacagggccagtttatgcttcaaagtaatgagtacttttccggcaaagtgaaaagtatcggcttttccagcagcagcactggtcgcgccagcgtgggtgttatggttgaaggcgaatacaccttcagcaccgctgagccggaagagatgacggtaatcagtggcgcgctgaatgtgttactgcctgacgcgaccgactggcaggtgtatgaagccggtagcgtgtttaatgttcccggtcacagtgagtttcatctgcaagttgccgaacccacctcttatctgtgccgctatctgtaattcctcgccttccccttgaacgggagggcatttttctgaaatatcctttctttagcccataataatatttcctttgctgcgattttttcaatttccgatatattcataatttatcaaggttgatataaatatcagtgaagatctccagatattgttgcggaactggctacgataaaagataaatcagatgatgaatggtggcgtgcattgctgcaaagtcgcaatgatcatttacgccaaacggcattgcgcaacgcacataccccggcgttgttgttaacgacattgactgagcctcaggatcggagcctggctattaataatccacagctggctgccgatgtgaaaacggcgtggttaaaagaggatccaagtttactcttatttgtcgaacaacccgatcttagcctgttacgtgatttagtgaaaaccggggcaacgcggaaaattcgcagtgaagcgcgtcaccggcttgaggaaaaacaatgacacaacgtccatggagcaagttacagcgtaaaacgcataatattgctgcgctaaaaattattgctcgccgtagcgaataattatatgcctggtgtggcttcgtacgccggataagacgcggcaggcgtcgcatccggcattaaaggaaaatcagcaattaacgttgtgcttcgccacctaatccttcaatcaggttttgaattaacgctgccagttcaccagtcatcaggatgaaatcggcatcaaaacgctgggcgaaatcttcacggtcgatatcttcgttttgatcgcgcagctcgtcgcagaacttcagacgcttgaggctaccatcgtcgcacatcacaaactgaatgcgctgctgccagtcgagcgccagtttagtcaccacttttccggcttcaatgtgattggtgatctcttcgctggtcagatcttgtttcttcgcgcggatcacgccgccatcttccagcaagcttttcagctcggcttcatcaagcagctggaagccctgtgccgcactgccggagcgaacccattcggtcagcgtcagttcaatcgggttttccatgctcaatggtacaaccggtaagctccccaggcttttacgcagtaatgccagcgtatcttccgcttttttggcactggcgcagtccaccataatcaaaccgttaaccgtgtcgatccacatcattgtctggctaaaacggctgaaagcacgcggcagcagagagtgcagcacttcgtctttcaggctatctttttcggttttcttcagcttacgcgcctgttccgcttccagtttggcgattttcgcttccagcgcctgtttaatcaccggagacgggaggattttttcttctttgcgcgcgcagataacaatttgaccattggcaacgtgcgttaacgcatcgctgtggcttcccatcggaggaacccagcccatcttcgccatgtcctggctgccgcatggggtaaatgccatgctggctagctgtttttccatctcttctgcacgcaggctaatctcgcggctaagacggtaaaccattaaatttttgaaccacagcatgataatttccacggccttgtcgttaaatttagcgggcatgataacgaattgtcggcggccttgcattgccaatccggttgtccgtctctacgctattgatattgaaaaaaataaggagagtaccgtgcgtataggtatcgatttaggcggcaccaaaactgaagtgattgcactgggcgatgcaggggagcagttgtaccgccatcgtctgcccacgccgcgtgatgattaccggcagactattgaaacgatcgccacgttggttgatatggcggagcaggcgacggggcagcgcggaacggtaggtatgggcattcctggcagtattagcccttacaccggtgtggtgaagaatgccaatagtacctggctcaacggtcagccattcgataaagacttaagcgcgaggttgcagcgggaagtgcggctggcaaatgacgctaactgtctggcggttagtgaagcagtagatggcgcggcagcgggagcgcagacggtatttgccgtgattatcggcacgggatgcggcgcgggcgtggcattcaatgggcgggcgcatatcggcggcaatggcacggcaggtgagtggggacacaatccgctaccgtggatggacgaagacgaactgcgttatcgcgaggaagtcccttgttattgcggtaaacaaggttgtattgaaacctttattagcggcacgggattcgcgatggattatcgtcgtttgagcggacatgcgctgaaaggcagtgaaattatccgcctggttgaagaaagcgatccggtagcggaactggcattgcgtcgctacgagctgcggctggcaaaaagcctggcacatgtcgtgaatattctcgatccggatgtgattgtcctggggggcgggatgagcaatgtagaccgtttatatcaaacggttgggcagttgattaaacaatttgtcttcggcggcgaatgtgaaacgccggtgcgtaaggcgaagcacggtgattccagcggcgtacgcggcgctgcgtggttatggccacaagagtaaaaaacgtaggcaattggcgcatcatgcctgatgcgacgcttgccgcgtcttatcaggcctacaaaaggtgccagaaccgtaggccggataaggcgttcacgccgcatccggcaataagtgctccgatgcctgatgcgacgcttgccgcgtcttatcaggcctgcaaaatgtgccagaaccgcgtagggcggataaggcgttcacgccgcatccggcaataagtaatgagcaccgagactataacttaccccagtggtttcgccagcaccggagtatccgccgcttgctggcgcttatagcgaccatacagcagcaagctgctcatcgcagcaaagctaagcagggcggcaggcagcgccacgtaattatatgccagccccagcgtcagcatcatacctccgcaatatgcgccgacggcgctaccgaggttaaacgctatttgcccacctgcggcacctaataactctccgcctttggcgttttgtagtaacaatatttgtagcggtgcactaagggcaaataatcccgcgcaacaaataaaagcaaaaataaggctcgttgttttcatgccgccgcagaaaaagagcatcagcagtgccagtacaattataaagtcagttactgctgcaatgcgcagtggactataacgtccactaatcctgccacttagcatatttcccagcaccatccctagcccaactaacatcataataaaggtcatcgccgtttcgctaaaaccggaaataaacatcatgtatggctttacgtagctgaaccaggcaaacacacctgcgttgccaaacatcgtggcggcgaaaattaaccacggggccgggctgcgcaaaaagtgaaattgttcgcgcagatttcctttcgcctcgtcgcgaatatctggcacccaaaaatagacgcttgccatcaccgcaatattaaaaacagcgatcaataaaaaggtgtaacgccagctaaattcctgacttaaatacgttcccagcggaatgcccagcaaattggcgactgtcatcccggaaaccatccccgccacggcggcggtgacttttccgggtttgataattttacttaacacgatcgctccgacgccaaaaaatgcgccatgcggaaagccggataccagccgaccaatggcgagcatcaggtaagagctagagagcgtgaacatggcgttgccaatgacgcacaacgccaccagaaacaacaagatatgtttgagactgtagcggctggaaaagagtgcgatgattggcgcaccgaccaccacccccagtgcataatagctgatcatatgcccggcggcaggaatgctaattcctacgttatgcgccagctccgtgagcacgcccataatgccaaattcggccatccccaaaccaaacgtgcccagagccaaagataaaatgacttttttcataccaccatcacaaccaccagaacggctaccaatcaccgtagccaataaagtgatagcttgcaggataacgaccagcaaggccaagagataattcgcccctctgtattcattatcctgctgaatagttatttcactgcaaacgtactttccagtttgctgtagcccaggccgttgatctttttcactttgatctgcaccggaatacgctctttcatcgcttctacgtggctaatcacaccgatggttttgccactggcgttcagggcatccagcgcatcaagggcggtatccagcgtttcgctatccagcgtgccaaaaccttcatcaaggaacaggctgtcaatacgtgttttatggctgaccagatcgctaagcgccagcgccagcgccagactaacgaggaaactttcgccgccggaaagggtacgggtatcgcgtaccgcatctgcctgccaggtatcaacaacctcgacttccagcgcctcgctggctttgcgctgtaacagatagcgcccgtgcagccgggtaagttgctgattagcgagatggactaaattatccagcgtcagcccctgggcaaacttgcggaatttatcgccctctttggaacctattaggctattcagatatccccagtcctcaacctgctgcgtcatttgagcaatttgctgcattaaggtttgttgttgctgacggttatctgcatcctgcttcagctgctggcgaatctcgccttgactcgtggtgttttcacgcaacttttggtgagtttgcgctaactcttgctgaatctgctccaccgtcacagtgagagccaacccgtcgtcaggtcggtgttgttgatgctgtgccagcgtttctgctgtctgagtgaccagagtttgcgcctgacggcgctggttttccagattctgcttgagctgttccagctgcgttagtgtttgttcatccattagcgccgcaaggaacgcctgctgatcgtcaaagacgctggcctgtagcgcggtgtcaaactgcgcctgggctttttgcagactttgcgccgccagaacatcctgttgctgtaacgtctgctgctggctgtgtaatgcgagacattgttcatgtacctgccgccagttttccaataccacagtttcttcgcagtgcgggagttcatcactttgcggcaacgtttccagaatcggcgtcagctgctgaatacggttttgcagcgcggttaattcgttctggcgttgctgccagctctgcgcttcttgctgacgtgtcgccaaccagctctcttcttcatcttcctgtggcaatgtcagtgcataacccgtcaatgtcgttaaaagtagttgctggcgttgttcaatttgctgttgatactggataatttgctgattatgcgcggcaatctgcccttgtaattcatgccgttggctgagtaaccgcagctggcgttcgtgctcatcttgtgcatccagccacggttgaatatcgtccagtggctgcaaggtgatattgaggctggccgtgacggcttgccattgttgagtaagtgcttgctcatcttgtcggaggctttgcgcttcgttttcatcacgctgaagctgctttgttatggcgtccagttgcccacgtagcgtcgcaccttcttcaccgagctttttaacttcgttttccagcgccagtaatcgagactgattaacgccaggctccagcgcctgatacgcctcgaccgccgggtggctggtggaaccacaaagtgggcaaggctgacccgcctgtaactgtgcacgttgagcttccagcgttttgatgcgcgcttcctgctcgcaaatggttttcacatcggcaagttgctgcgtcttttctttataacgctggcgcatttcgttaagtgcggcgttacgttgcgtctgttcttgcgtgacattctggatagcgacctgtaactgcgccagacgtttttgttggggaacaatctgtccatgcagcgcgaccaggtgctgacgcagtgggcgttgctcagcatgttgcgccagggcggtagcaacttcatcggcggttaacgtcaacgtgatcgccgcaagcgcattaagtttttgctcagcatgggttaactgttgctgccattgccgcagatgctcgcgatcgctggtttgttgggagaactgcgcacgccaacccgccggttcgttgttccactgacggaagcggtcgtgttcctgtaaccaggtattcaggctttgttgctgctgctgtaattctgcactctgcttcgccgcgtggtggcgaatgctcgcgcgaagcgccattgtgctctgtaagcgagtatttacttcttcaatctgctggcgaatatgcgccagcgccgcgctgtgttctgcgatgcgttcccagtgtggacgaagatttcgtgccggttgtgccagactaagcgccgccagttgaggttgcgctttttcttcttcggctaacgcctgttgcaaggcctgctgacggcggctggcttcttgctgcaattcgtcctgacgcgttaaccagtttaggctttgttgttcttgctgctgcgcggtaattaactgtttttcttcgtcagtaagtacctgcaaactcgctgtcaggctttgcacttgttccggcgtgagcaacgtgacgccgctggcctgcgcttgcagcttctccagctctgtgcgggcgcttttgtgctgctcaaaaaccatcgcgctgatttgcccgtagatttcagtgccggttaactcctcgagcaattccgcgcgttctttgggtttggcattcaggaaggcagcaaattgcccctggctaagcagcatgctacgggtgaagcgcccgtaatccagcccggttaacgtcgctgtcagttccagcttatctttcactttgtcggcgagaattttgccgtcggcgcagcgcgccagctctacgcgtggcacctgcaaattaccgtcgggttggttacgcgcccgattctggctccagaatgcacggtacgcttcacctttcacttcaaactccacctccgccagacattcggcggtatcgcgggtcatgagatcattttggctttgactaacgttagagagacgcggagtttcgtgatacagcgccagacaaatggcgtccagcagggtggttttccccgcacctgttgggccggtaatagcaaacagcccgttgctggcgaacggctcgcgggtgaaatcaatcttccattcgccttttaaactgttcaggtttttcaggcgcaggctgagaattttcatgcttcgtgttctccggcgagggtatgcaacgtcgtggtgaaaagatgctgcagacgttgctgctggctttcatccagttcttccagtgccagacggcgattgaacacctcttcgacgctgagttcgctgagggtttcacgctgttggctggctaacacacgctcgcgctgttcacgactccgacgtaccagcaatacttcgacaggcaaactttcggttaatgcctggattttgcgctgaatatcatgcagatactcatcagtagtgatttcgatatccagccagacaggtggctcctggcttacatcgcgccactgttccagctgtgcggtaatgctcgccagatcgcctttcagcactgccatgggttgcgttaccggtacgttcaggttttccacgctctctaatttgccgttactaaatgtcaccagatggacatatttactcttaccgcattcatcaaaactcagtggaatgggggagccgcaatagcgaacatgttccatgccgccaataatctgtgcgcggtgaatatgcccgagcgcgatgtagtcggctggtggaaagttttgtgccggaaacgcgtccagcgtgccaatataaatgtcacgcacggcgtcacttttactggcccccacggtcgttaaatgtcccgtggcgatgatgggcagaggctgatcgccgcgcagtttgcaggcatcggcatagtgttgttggtaataatcggtaatcgctgccagtaaatgctgctgtttttcaataccgttaagccccgcctggctggtaataatgtcacgcggacgtaaaaacggaatggggcacagcactgcgcctggcgtcccgtcgcgacgaggcaagatttgcggcgcatgtccggcgctggcgaccacggtagtattgaggaacgccatgatatcgcggctttcattcagcgtggcgacgctgtcatggtttcctgccagtaccaccagatgacagccagtttgctgtaaattgacaacaaaacggttgtataacgtgcgggcgtaactgggcgggctgccggtatcgaaagcatcaccggcaacaataatcgcatccacctgatgggtttgtgctgtctccagcagccagtcaagaaaagcctgatgttcagcttcgcggcttttactgtagaagttctggccgagatgccagtcactggtgtgaaggatgcgcataacggttccctggcgaaaaagcatgggcgcgattatacccaaacagatgtgccatttgcttttttctgcgccacggaaatcaataacctgaagatatgtgcgacgagcttttcataaatctgtcataaatctgacgcataatgacgtcgcattaatgatcgcaacctatttattacaacagggcaaatcatggcgagacgtattctggtcgtagaagatgaagctccaattcgcgaaatggtctgcttcgtgctcgaacaaaatggctttcagccggtcgaagcggaagattatgacagtgctgtgaatcaactgaatgaaccctggccggatttaattctcctcgactggatgttacctggcggctccggtatccagttcatcaaacacctcaagcgcgagagcatgacccgggatattccagtggtgatgttgaccgccagaggggaagaagaagatcgcgtgcgcggccttgaaaccggcgcggatgactatatcaccaagccgtttagcccgaaggagctggtggcgcgaatcaaagcggtaatgcgccgtattagcccaatggcggtggaagaggtgattgagatgcagggattaagtctcgacccgacatctcaccgagtgatggcgggcgaagagccgctggagatggggccgacagaatttaaactgctgcacttttttatgacgcatcctgagcgcgtgtacagccgcgagcagctgttaaaccacgtctggggaactaacgtgtatgtggaagaccgcacggtcgatgtccacattcgtcgcctgcgtaaagcactggagcccggcgggcatgaccgcatggtgcagaccgtgcgcggtacaggatatcgttttagtacccgcttttaacgccttgctcatcggacgcagagcagggcttatgatttcttaactggagtatcttacgtgctggaacggctgagctggaaaaggctggtgctggagctgctactttgctgcctcccggctttcatcctgggtgcattttttggttacctgccctggtttttgctggcaagcgtaacaggactgcttatctggcatttctggaatttattgcgccttagttggtggctgtgggtggatcgcagtatgaccccgccaccggggcgtggtagctgggaaccgctactatacggcttacaccagatgcagctgcgaaataaaaaacgccgccgtgaactgggcaatctgattaaacgctttcgtagcggcgcggagagcctgcccgacgcggtggtgctgaccacggaagagggcggtattttctggtgtaacggtctggcgcaacaaattcttggtttgcgctggccggaagataacgggcagaacatccttaacctactgcgttacccggagtttacgcaatatctgaaaacgcgtgatttttctcgcccgctcaatctggtgctcaacaccgggcggcatctggaaattcgcgtcatgccttatacccacaaacagttgctgatggtggcgcgtgatgtcacgcaaatgcatcaactggaaggggcgcggcgtaacttttttgccaacgtgagccatgagttacgtacgccattgaccgtgttacagggttacctggagatgatgaatgagcagccgctggaaggcgcggtacgcgaaaaagcgttgcacaccatgcgcgagcagacccagcggatggaaggactggtgaagcaattgctgacgctgagcaaaatagaagccgcaccgacgcatttgctcaatgaaaaggttgatgtgccgatgatgctgcgcgttgttgagcgcgaggctcagactctgagtcagaaaaaacagacatttacctttgagatagataacggcctcaaggtgtctggcaacgaagatcagctacgcagtgcgattagcaacctggtctataacgccgtgaatcatacgccggaaggcacgcatatcaccgtacgctggcagcgagtgccgcacggtgccgaatttagcgttgaagataacggaccgggcattgcaccggagcatattccgcgcctgaccgagcgtttttatcgcgttgataaagcgcgttcccggcaaaccggcggtagcggattagggttagcgatcgtgaaacatgctgtgaatcatcacgaaagtcgcctgaatattgagagtacagtaggaaaaggaacacgtttcagttttgttatcccggaacgtttaattgccaaaaacagcgattaatccgcctttgtcatcttttattgccataagccagtcgatgctggcttattttctttgcagtcaaaatacgggcgttagattttacaacgattggtgattttttgttcgcatgattagccatgtctttttcacggaaatagtgttttatactggttggtgatttcttatcgctatatacctctggtttttagatccctccttgctttaaaacgttataagcgtttaaattgcgcttcaggtgctgtcatactgactgcattaacgcggtaaatcgaaaaactattcttcgccgcgcctggttgggagtatttcccgctaaaattgtttaaatataccgctgtatcatccccagggattggcacaaaaatttaacgttacaacaccacatccacaggcagtatgatttatgacccatcaattaagaagccgcgatatcatcgctctgggctttatgacatttgcgttgttcgtcggcgcaggtaacattattttccctccaatggtcggcttacaggcaggcgaacacgtctggactgcggcattcggcttcctcattactgccgttggcctgccggtattaacggtagtggcgctggcaaaagttggcggcggtgttgacagcctcagcacgccaatcggtaaagtcgctggcgtactgctggcaacggtttgttacctggcggtggggccgcttttcgctacgccgcgtacagctaccgtttcctttgaagtggggattgcgccgctgacgggtgattccgcgctgccgctgtttatctacagcctggtctatttcgctatcgttattctggttagcctctatccgggcaagctgctggataccgtgggcaacttccttgcgccgctgaaaattatcgcgctggtcatcctgtctgttgccgctattgtctggccggcgggttctatcagcacggcgactgaggcttatcaaaacgctgcgttttctaacggcttcgttaacggctatctgaccatggatacgctgggcgcaatggtgtttggtatcgttattgttaacgcggcgcgttctcgtggcgttaccgaagcgcgtctgctgacccgttataccgtctgggctggcctgatggcgggtgttggtctgactctgctgtacctggcgctgttccgtctggggagtgacagcgcgagcctggtcgatcagtctgcaaacggcgctgctattctgcatgcttacgttcagcacacctttggcggcggcggtagcttcctgctggcggcgttaatcttcatcgcctgcctggtaacggcagttggcctgacctgtgcttgtgcagaattctttgcccagtacgtaccgctctcttatcgtacgctggtgtttatcctcggcggcttcagcatggtggtttctaacctcggcttaagccagctgatccagatctccgtaccggtgctgaccgctatttatccgccgtgtatcgcactggttgtattaagttttacacgcagttggtggcataatagctcccgcgtgattgctccgccgatgtttatcagcctgctttttggtattctcgacgggatcaaagcatctgcattcagcgatatcttaccgtcctgggcgcagcgtttaccgctggccgaacaaggtctggcgtggttaatgccaacagtggtgatggtggttctggccattatctgggatcgcgcggcaggtcgtcaggtgacctccagcgctcactaaatcactgaacatttgttttaaccacggggctgcgatgccccgtggttttttattgtgttgatgggttaggaattgatggaaagtaagaacaagctaaagcgtgggctaagtacccgccacatacgctttatggcactgggtagtgcaattggcaccgggctgttttacggtagcgcagacgccatcaaaatggccggtccgagcgtgttgttggcctatattatcggtggtatcgcggcgtatatcattatgcgtgcgctgggggaaatgagcgtacataacccggccgccagctctttcagccgttatgcgcaggaaaacctcggcccgctggcaggttacattaccggctggacctactgctttgaaatccttattgtcgccatcgccgatgtgaccgcttttggtatctatatgggtgtctggttcccgacggtgccgcactggatttgggtactgagcgtggtgctgatcatttgcgccgtaaacctgatgagcgtgaaggtattcggtgagctggaattctggttcagcttctttaaagtcgccaccatcatcatcatgattgtcgccggtttcggcatcatcatctgggggattggcagcggcgggcaaccgaccggtattcataacctgtggagcaacggcggcttcttcagtaacggctggcttggcatggtaatgagcttgcaaatggtgatgtttgcttacggtgggatcgaaattatcgggattaccgccggtgaagcgaaagatcctgagaaaagcataccgcgtgcgattaactccgtgccgatgcgtattctggtgttctacgtcggtacgctgttcgtcattatgtctatctacccgtggaatcaggttggcactgccggtagcccgttcgtgctgacgttccagcatatgggcattacctttgccgccagcattcttaactttgttgtgctgactgctagcctgagcgcaattaacagtgatgtatttggcgtaggccgtatgctccacggtatggcagagcagggcagcgcgccgaaaattttcagcaaaacgagccgtcgcggtattccgtgggttacggtgctggtgatgactaccgcgctgctgtttgcggtgtatctgaactacatcatgccggaaaacgtcttcctggtgatcgctagcctggcaaccttcgccacggtgtgggtgtggattatgatcctgctgagccaaattgccttccgtcgccgtttgccgccagaagaagttaaggcgctgaaatttaaagtgccgggtggggtagcaacgaccatcggcgggctgattttcctgctctttattatcgggttgattggttatcacccggatacgcgtatcagcctgtatgtcggtttcgcgtggattgttgtgctgttgattggctggatgtttaaacgccgccacgatcgtcagctggctgaaaaccagtaatccttgcgttctgtaagccggttcaggaggaaatcctgatccggctattccgaaagttatccgcccccgtcctcctcccccaaatatccttcagatgatgagtgatcctgcattaggctatggcaaggtgatcagattttcatcacaggggaattatgatgttaaatgcatggcacctgccggtgcccccatttgttaaacaaagcaaagatcaactgctcattacactgtggctgacgggcgaagacccaccgcagcgcattatgctgcgtacagaacacgataacgaagaaatgagtgtaccgatgcataagcagcgcagtcagccgcagcctggcgtcaccgcatggcgtgcggcgattgatctctccagcggacaaccccggcggcgttacagtttcaaactgctgtggcacgatcgccagcgttggtttacaccgcagggcttcagccgaatgccgccggcacgactggagcagtttgccgtcgatgtaccggatatcggcccacaatgggctgcggatcagattttttatcagatcttccctgatcgttttgcgcgtagtcttcctcgtgaagctgaacaggatcatgtctattaccatcatgcagccggacaagagatcatcttgcgtgactgggatgaaccggtcacggcgcaggcgggcggaagtacgttctatggcggcgatctggacgggataagcgaaaaactgccgtatctgaaaaagcttggcgtgacagcgctgtatctcaatccggtgtttaaagctcccagcgtacataaatacgataccgaggattatcgccatgtcgatccgcagtttggcggtgatggggcgttgctgcgtttgcgacacaatacgcagcagctgggaatgcggctggtgctggacggcgtgtttaaccacagtggcgattcccatgcctggtttgacaggcataatcgtggcacgggtggtgcttgtcacaaccccgaaagcccctggcgcgactggtacagctttagtgatgatggcacggcgctcgactggcttggctatgccagcttgccgaagctggattatcagagcgaaagtctggtgaatgaaatttatcgcggggaagacagtattgtccgccactggctgaaagcgccgtggaatatggacggctggcggctggatgtggtgcatatgctgggggaggcgggtggggcgcgcaataatatgcagcacgttgccgggatcaccgaagcggcgaaagaaacccagccggaagcgtatattgtcggcgaacattttggcgatgcacggcaatggttacaggccgatgtggaagatgccgccatgaactatcgtggcttcacattcccgttgtggggatttcttgccaataccgatatctcttacgatccgcagcaaattgatgcccaaacctgtatggcctggatggataattaccgcgcagggctttctcatcaacaacaattacgtatgtttaatcagctcgacagccacgatactgcgcgatttaaaacgctgctcggtcgggatattgcgcgcctgccgctggcggtggtctggctgttcacctggcctggtgtaccgtgcatttattacggtgatgaagtaggactggatggcaaaaacgatccgttttgccgtaaaccgttcccctggcaggtggaaaagcaggatacggcgttattcgcgctgtaccagcgaatgattgcgctgcgtaagaaaagtcaggcgctacgtcatggcggctgtcaggtgctgtatgcggaagataacgtggtggtatttgtccgcgtgctgaatcagcaacgtgtactggtggcaatcaaccgtggcgaggcctgtgaagtggtgctacccgcgagtccgtttctcaatgccgtgcaatggcaatgcaaagaagggcatgggcaactgactgacgggattctggctttgcctgccattagcgctacggtatggatgaactaacgttttataacgccttgcgactcgcctgcgccatcatccgcggataaaactgccagaagcgggtttcgagggcgtcataatgagcgtctaaatcgtaccaggagtcacgcagggcatccagacgtgggcggcggcttgccatgccgtttaacacgttctggatgaaatccatatcgcgatagcgcaccagccactgctcactccacaagtaattgttcagattgataaaacgtggcggactgtccggcaaaatcgtcatcacttgctcgcgggcataacagacaaattcctgtagcggaaagtccgggctcagctggctccagtggcgggaaagaaagtgatcccacatgacatccagcgtaataggcgcaacgcggcgcgtttcactacgaaaccactcccgtgcttcgcggacttccggcagattgtcagtcaatacgtcgatacgtcgatgcatatgaatgccagccacgacgtcgggcggaaaactttcttcaggatttccgcgtacgaaatcagccagtaaattgccggaaaggctgctttccgcgagatgggctaaatgcaggtgagctaaaaaattcatcgattatattctatccaaaagggggtaaaggttgcagggagagcgccccggcactagactacccgcctcttattttagtctgagtcagtgtcatgcgcgttaccgatttctcctttgaattgcccgaatccctgattgcccactatcccatgcctgaacgcagtagctgtcgtttactgagcctggacgggccgacgggcgcgctgacgcacggtactttcaccgatttacttgataagctcaaccccggcgatcttctggtttttaataatacccgcgtgatcccggcgcgcctgtttgggcgtaaagccagcggcggcaagattgaagtgctggttgaacggatgctcgacgacaaacgcattcttgcgcatattcgcgccagcaaagcgccaaaacctggcgcagaactgctgctgggcgatgacgaaagtattaacgcaacaatgaccgcgcgccacggcgcactgtttgaagtcgaatttaatgatgaacgcagcgtgctggatattctcaacagcatcggccatatgccgctgccgccgtatatcgaccgtccggacgaagacgctgaccgcgaactttatcaaaccgtttatagcgaaaaaccgggcgcggttgcagccccgaccgcaggtctgcattttgacgagcctttgctggaaaaattgcgcgccaaaggcgtggagatggcgtttgtgacgttgcacgttggtgcgggcaccttccagccggtgcgcgtcgacaccattgaagatcacatcatgcacagcgaatacgctgaagtaccgcaggatgtggtagacgcggtactggcggcgaaagcgcgcggtaaccgggtgattgcggttggcaccactagtgtacgtagcctggaaagcgcggctcaggcagcgaaaaacgatctcattgaaccgttcttcgacgatacccaaatctttatctatccgggcttccagtacaaagtggtcgatgcgctggtgacgaacttccacttgccagagagcacgctgattatgctggttagcgcctttgccggttatcaacacaccatgaacgcctataaagcagcggtagaagagaaatatcgcttttttagttacggtgatgcgatgtttatcacgtacaatccgcaggcaattaatgagcgcgtcggggagtaattccgcggcgctggtttaaaacgttggactgtttttctgacgtagtggagaaaaaatgaaatttgaactggacaccaccgacggtcgcgcacgccgtggccgcctggtctttgatcgtggcgtagtggaaacgccttgttttatgcctgttggcacctacggcaccgtaaaagggatgacgccggaagaagttgaagccactggcgcgcaaattatcctcggcaacaccttccacctgtggctgcgcccgggccaggaaatcatgaaactgcacggcgatctgcacgattttatgcagtggaaggggccgatcctcaccgactccggcggcttccaggtcttcagccttggcgatattcgtaaaatcaccgaacagggcgtgcacttccgtaacccgatcaacggcgatccgattttcctcgatcctgaaaaaagtatggagattcagtacgatcttggtagcgatatcgtcatgatctttgatgagtgtacgccgtatcctgctgactgggattacgcaaaacgctccatggagatgtctctgcgttgggcgaagcgtagccgtgagcgttttgacagtctcggaaacaaaaatgcgctgtttggtatcatccagggcagcgtttacgaagatttacgtgatatttctgttaaaggtctggtagatatcggttttgatggctacgctgtcggcggtctggctgtgggtgagccgaaagcagatatgcaccgcattctggagcatgtatgcccgcaaattccggcagacaaaccgcgttacctgatgggcgttggtaaaccagaagacctggttgaaggcgtacgtcgtggtatcgatatgtttgactgcgtaatgccaacccgcaacgcccgaaatggtcatttgttcgtgaccgatggcgtggtgaaaatccgcaatgcgaagtataagagcgatactggcccactcgatcctgagtgtgattgctacacctgtcgcaattatagtcgcgcttacttgcatcatcttgaccgttgcaacgaaatattaggcgcgcgactcaacaccattcataaccttcgttactaccagcgtttgatggcgggtttacgcaaggctattgaagagggtaaattagagagcttcgtaactgatttttaccagcgtcaggggcgagaagtaccacctttgaacgttgattaatattaataatgagggaaatttaatgagcttttttatttctgatgcggtagcggcaacgggtgcaccggcgcaaggtagcccgatgtctttgattttgatgctggtggtattcggtctgattttctatttcatgatcctgcgtccacagcagaagcgcaccaaagaacacaaaaagctgatggactccattgccaaaggtgatgaagttctgacgaacggtggcctggttggtcgcgtaaccaaagtagcggaaaacggctacattgctatcgcgctgaatgacaccactgaagtagttattaaacgtgacttcgtagctgccgtcctgccgaaaggcaccatgaaggcgctgtaattaaaatttttccctaagggaattgccgtgttaaaccgttatcctttgtggaagtacgtcatgctgatcgtggtgattgtcatcggtctgctgtatgcgcttcccaacctgtttggtgaggatccggctgttcagatcactggtgcgcgcggagtcgccgccagtgagcaaacgctgatccaggtccagaaaacgttacaagaagaaaaaataactgctaagtctgtggcactggaagagggcgctattcttgcgcgcttcgactccactgacacccagttgcgcgctcgtgaagcattaatgggcgttatgggtgacaaatacgtcgtggcgcttaaccttgccccggcaacgccgcgctggctggcagctattcacgctgagccgatgaagctcggccttgacctgcgtggcggcgttcacttcctgatggaagtggatatggacaccgcgcttggcaaactccaggaacaaaatatcgatagcctacgcagtgacctgcgcgaaaagggcatcccgtataccactgttcgtaaagaaaacaactacggcctgagcatcactttccgcgatgctaaagctcgtgatgaagccattgcgtatctgagcaagcgccatccggacctggtgattagcagccagggcagcaaccagctgcgtgcggtaatgagcgatgctcgtctgagtgaagcgcgtgaatatgcggtgcagcagaacattaatatcctgcgtaaccgtgtaaaccaacttggcgtggcggagccggtggttcagcgtcagggtgctgaccgtatcgttgttgaactgccaggtattcaggacactgcgcgtgcgaaagagattctgggtgcgacggcaacgctggaattccgtctggtaaacaccaacgttgaccaggccgctgcggcatccggtcgcgtaccgggcgactctgaagtgaaacagacccgcgaaggtcagccagttgtgctgtacaaacgcgtaattctgaccggtgaccatatcaccgactccacttccagccaggacgaatacaaccaaccgcaggttaacatcagcctcgatagcgctggtggtaacatcatgtctaacttcactaaggacaacatcggcaaaccgatggcaaccctgtttgtggagtacaaagacagcggtaagaaagatgcaaatggtcgtgcggttctggtgaaacaggaagaggtgattaacatcgccaacatccagtctcgtctgggtaacagcttccgtatcaccggcatcaacaacccgaacgaagcccgtcagctgagtctgctgctgcgtgccggtgcgttgatcgcgccgattcagattgttgaagaacgtaccattggcccaaccctgggtatgcagaacattgaacaggggctggaggcttgccttgccggtctgctggtttctattctgttcatgatcatcttctataagaagtttggtctgattgcgaccagtgctctgattgccaacttgatcttaatcgtcggcattatgagcctgttgccaggcgcaacgctgagtatgccaggtatcgcgggtatcgtcttaacccttgcggtggcggtcgatgcgaacgtactgatcaacgaacgtattaaagaagagttgagcaacggacgtactgttcaacaggcaattgatgaaggttatcgtggcgcattcagttctatcttcgatgcgaacatcaccacgctgattaaagtcatcatcctgtacgcagtgggtaccggggcaattaaagggttcgcgattactaccggtatcggtgtggcgacgagcatgtttaccgcgattgtcggtacgcgtgccatcgtaaacctgctatatggcggcaagcgcgtcaagaagctgagtatctgaggagtgcgatgtggcacaggaatatactgttgaacaactaaaccacggccgtaaagtctatgactttatgcgctgggactactgggctttcggcatctctggtctgctgttaatcgctgctatcgttattatgggcgtgcgcggctttaactgggggctggatttcaccggtggtacggttattgaaattacgctcgaaaaaccggctgaaattgacgtaatgcgtgatgcattgcaaaaagccggttttgaagagccgatgctgcaaaactttggtagcagccatgacatcatggtccgtatgccgcctgctgaaggcgaaaccggcggtcaggtgttgggcagccaggttctgaaggtgattaacgaatccaccaatcagaatgcagcagtgaagcgtattgagttcgtcggtccgagcgtgggggcagaccttgcgcaaaccggtgcgatggcgttgatggcagcgctgctgtctatcctcgtgtacgtaggtttccgctttgagtggcgactggcggcaggggtggttattgcgctggcgcacgacgttatcattacgctgggtattttgagcttattccatatcgagattgacctgaccattgtggcaagcttgatgagcgttatcggttacagccttaacgacagtatcgtggtaagcgaccgtattcgtgaaaacttccgcaagatccgtcgcggtacgccttacgaaatctttaacgtgtccttgacccagacgctgcaccgtaccttgatcacatccggtactaccttgatggttatcctgatgctgtacctcttcggtggtccggtactggaaggcttcagcctgaccatgcttatcggtgtttccatcggtactgcatcttccatctatgtggcatctgcgttggctctgaaactgggtatgaagcgcgaacacatgttgcagcagaaagtggaaaaagaaggggcggatcagccgagtattctgccgtaatcaagttcccgttgatgttgaaaatcccggtcagaagatcgggattttttttgatgtatggagattgcgaaaatccccgcatcttgggaaactgcgcgtaaccctacatttcatccaggtaacttttcatggctatcatcccaaaaaactatgcgcggttagaaagcggctatcgcgaaaaagcattaaaaatctatccgtgggtctgcggtcgctgttcccgcgagtttgtttattccaacctgcgtgaacttaccgttcaccacattgatcacgaccataccaataacccggaagatggcagtaactgggaattgttgtgtctctattgccacgatcatgagcatagcaaatataccgaagcggatcagtatggtacgaccgttatcgcaggggaagatgcgcagaaagatgtcggtgaagcgaagtacaacccattcgctgacctgaaagcgatgatgaacaagaagaagtgattaaaacgtaaaattgcctgatgcgctacgcttatcaggcctacgttatttcagcaatatattgaatttacgtgcttttgttggccggacaaagcgtttacgccgcatccggcatgaacaaagcacacgttgttaacaatcagaaatgccgggaataaatcccggcattttcataatcagaagttgtaacctactaccaggtaaccaccccagccggtagagcgaacgttgaagttgccgttgccgaagttcagttctgcatcgtcgttccactgaccaccgtcgtgccagtaacgagctacgacagagtagtgccagtgatcgtagttcagagccagaatatggctggaagcgatagagttattagtacgggtcttaataccgttgattgcgttaccgctgtcatcccctaaatcggaaccccagtcgaagttggtgaagccgatgtagctcagctgaccgccccacagatcggtaatcggcacaaagtatttaattttgaaacggtaaccgtcccactcgttttcgttcgctgcgccatagttctgccactggtatttcgcatagacgttcatggacaggctcatcggcaggccagtgtcgatatcggtacccagacccatgtaccaggtgctctggcgaccatctttattacgacccatgtcgtaaatgtagttgttcgcgaagtaccactctttgaacggaccgaagctaaggtcagtattggtcagcttgtcgatggagaaacgtggttcgatttccataaacagcggagaaccgtggttccagatacctttagcatcggagttaccgccgaagaataccggcgcatccgcataaccatagaagtcgaaccagtcttttttagcgaatgcttcgtactcaaggtaggtatcgttgcggatctgcggtccgaaacgggtgtgatagcttccgacaacgttaacgctctggtgccaccagtcggaaagatactgcggtttgtcgttttcagctgcgttgacagtaaaagagctagagagcgccagtaccgcaccggctgccagtaatgtttttttcatatgtatgccactgtttgaaaatcccttgcgggagtgaaaaaggcgcaaattgcgtttctaaatatttcgtatacagaggagcctattataaaaatcattgctcacaaaaatatgtttcgtttcacagttctatcatttacgtaatcgattgcgttcacgtttacacacattcgggcggggattgtactgactttcgcccttgttgcaaacttttactatcaatccaggtgatgtaagcagagtaacaaaatgacggggaaagatgttgcgggacgcacaaaatcgtcccgaaatacgtttactgcataacaggttgaatgtcgtggatacgtacaaagcctaactgatccacagaaatcccctttaactgtaacggaatatcaacatcgctgggggcgaggacgctggcaggggcattaatcaattgattctgcacattgatttcctgaaagttgtctattgttccctgaatttgcccatattcaacagttccgctgaatgcgggcaagggatcattgctctcaccctgaatacgtagtgtaagggtggtgccatctgcatcaggcgtaatattcaccaggctcatacgtaaagtaccgatctggctttccagtcttgccggtgttttcgctccaggcagaaggtaaaccccactgctggattttgcattcagcctgttttgctgagtgattttgactgtttcttgattgagttgcgtcatctcctggttcagcgtgctgacgctgtgtttcatctgtcgcacttcactttgctgcacacaggcgctaaggctgaacaggcttcccagcaggagcagtcgaaaaacgttagtattcataggtcgtccctttctcgtcgcaattagcctaatggtagagggtaaaagcagcgaaagcatcgatcctttatctcaaaagcgttgcgcctttgttgtatcgtcagttcagggtaaaatagatttccgttaaccacctggtcaggacgccgtatgcattgcccattctgtttcgccgtggacactaaggtaattgactctcgtctcgtgggcgagggtagttccgtacgccgccgtcggcagtgtctggtgtgtaatgaacgtttcaccacctttgaagtggcggagctggttatgccgcgtgttgtaaaaagcaacgacgtgcgtgaaccgtttaatgaagagaaattgcgtagcggaatgctgcgggcgctggaaaaacgtccggtgagttccgatgacgtcgaaatggcaatcaatcatattaaaagccagctgcgcgccaccggtgagcgcgaagtgccgagcaagatgattggcaatctggtgatggagcaattgaaaaagctcgataaagtcgcctatatccgttttgcctctgtctaccgcagtttcgaagatatcaaagaatttggcgaagagatcgcgcgcctggaggactaagccgtgcaggacgagtattacatggcgcgggcgctaaagctggcgcaacgaggacgttttaccacgcatcccaacccgaatgtcgggtgcgtcattgtcaaagatggcgaaattgtcggtgaaggttaccaccaacgtgcgggtgaaccacatgccgaagtacacgcgttgcgtatggcgggtgaaaaagccaaaggtgcgaccgcctatgtcacactcgaaccctgtagccatcatggtcgtacgccaccgtgctgtgacgcactcatcgccgctggcgtagcgcgcgtggttgccagcatgcaagatcctaacccgcaggtcgctgggcgtggactttaccgtctgcaacaggctggcattgacgtcagccacggcctgatgatgagtgaagccgagcaattgaataaaggctttctcaagcggatgcgcaccggctttccttatattcagttaaaacttggcgcaagccttgatggtcgcacggcgatggcgagcggcgaaagccagtggatcactagcccccaggcgcggcgtgatgtacaactactgcgcgcgcaaagtcatgccattttaaccagcagcgccacggtgctggcggatgatcctgccttaacggtgcgttggtctgaactggatgaacaaactcaggcgctctatccgcaacaaaatctccgtcagccgatacgtattgtgattgatagccaaaatcgcgtgacgccggtacatcgcattgtgcagcagcccggcgaaacctggttcgcgcgtacgcaggaagattctcgtgagtggccggaaacggtgcgtaccttgctgattccagagcataaaggtcatctggatctggttgtactgatgatgcaactgggtaaacagcaaattaacagcatctgggtggaagcggggccaacgctcgctggcgcattgctgcaggcgggtttagtcgatgagctgattgtctatatcgcacctaaactattaggcagcgacgcccgcggattatgcacgctgccagggcttgagaaattagccgacgccccccaatttaaattcaaagagatacgtcatgtaggcccggatgtttgcctgcatttagtgggtgcatgatctcccggctcgaaagggaagcagcgcacgaaatattatgctaaaatccgcccccctgcggggccatactcgaacccgaaggaagaaaatgaacattattgaagctaacgttgctaccccggacgctcgcgtcgccatcaccatcgcgcgtttcaacaactttatcaatgacagcctgctggaaggtgcaattgacgcactgaaacgtatcggtcaggtaaaagatgaaaacattaccgttgtttgggtgcctggtgcctatgagctgccgctggcggcgggtgcactggctaaaaccggtaaatacgacgcggtgattgcgctgggtacggttattcgtggtggcactgcccactttgaatatgtcgctggtggtgcaagcaacggcctggcgcatgttgcccaggacagcgaaattccggttgcttttggggttctgaccactgaaagcattgaacaagcgatcgaacgtgctggcaccaaagctggcaacaaaggtgcagaagctgcactgaccgcgcttgaaatgattaatgtattgaaagccatcaaggcctgaaattagtaaggggaaatccgtgaaacctgctgctcgtcgccgcgctcgtgagtgtgccgtccaggcgctctactcctggcagttgtcccagaacgacatcgctgatgttgaataccagttcctggctgaacaggatgtaaaagacgttgacgtcctgtacttccgtgagctgctggccggggtggcgactaataccgcatacctcgacggactgatgaagccatacctgtcccgcctgctggaagaactgggacaggtagaaaaagcagtactgcgcattgcgctgtacgaactgtctaaacgtagcgatgtgccatacaaagtggccattaacgaagcgatcgaactggcgaaaagcttcggcgcagaagacagccataagttcgtcaacggcgtactcgataaagcagcacctgtgattcgccctaacaaaaagtgatatccaggccggtagattcacggaagaccgttccatgatcgccggccttttcttttttacctgctgaggcataacgtatggcatgtggcgagttctccctgattgcccgttattttgaccgtgtaagaagttctcgtcttgatgtcgaactgggcatcggcgacgattgcgcacttctcaatatccccgagaaacagaccctggcgatcagcactgatacgctggtggcgggtaaccatttcctccctgatatcgatcctgctgatctggcttataaagcactggcggtgaacctaagcgatctggcagcgatgggggccgatccggcctggctgacgctggcattaaccttaccggacgtagacgaagcgtggcttgagtccttcagcgacagtttgtttgatcttctcaattattacgatatgcaactcattggcggcgataccacgcgtgggccattaagtatgacgttgggtatccacggctttgttccgatgggacgagccttaacgcgctctggggcgaaaccgggtgactggatctatgtgaccggtacaccgggcgatagcgccgccgggctggcgattttgcaaaaccgtttgcaggttgccgatgctaaagatgcggactacttgatcaaacgtcatctccgtccaagcccgcgtattttacaggggcaggcactgcgcgatctggcaaatagtgccatcgatctctctgacggtttgatttccgatctcgggcatatcgtgaaagccagcgactgcggcgcacgtattgacctggcattgctgccgttttctgatgcgctttctcgccatgttgaaccggaacaggcgctgcgctgggcgctctctggcggtgaagattacgagttgtgtttcactgtgccggaactgaaccgtggcgcgctggatgtggctctcggacacctgggcgtaccgtttacctgtatcgggcaaatgaccgccgatatcgaagggctttgttttattcgtgacggcgaacctgttacattagactggaaaggatatgaccattttgccacgccataaagatgtcgcgaaaagtcgcctgaagatgagtaatccgtggcatctacttgctgtcggattcggaagtggattaagcccgatcgttcctgggacgatgggcagcctggcagcgattccgttctggtatctgatgacctttttgccctggcagctctacagcctggtggtgatgctggggatctgtatcggcgtctatctttgtcatcaaacggcgaaagacatgggtgtgcacgatcatggcagcattgtctgggacgaatttattggtatgtggatcacgctcatggcgctgccgaccaatgactggcagtgggttgccgccgggtttgtgattttccgtattctggatatgtggaagccgtggccgatccgctggtttgatcgcaatgtgcatggcggcatggggatcatgatcgacgatattgtcgccggggtgatttccgcaggcatcctgtattttatcggtcatcactggccgctgggtattctgagctaattgtgcaccgatgcctgatgtgacgcttgtcacgtctcatcaggcctggactcttatttaaatcctacgacaggatgcggtttatacggcgtttccagttcggcaatctgttccggcttcaaagtgatatccaccgcgttcaatagctcatcaagctgttcttcgcggctagttccgataatcggtgcggcaatgcccggtttactcaacaaccaggccagcgcaacttgtgctcgtgtcgcccccagttcttcactgacgcctgttaaccgctctgcgatctgcgcgtcattttcatcgctttctttatagagatttttccccacctcatcagacaccagtcgtgcggtagtttctccccacggacgcgtcagacggccccttgccagcgggctccatggaattaccgccacgccctcctgataacacagtggtagcatctcgcgctcttcttcacgataaatcagattgtagtgatcctgcatactgacaaactgcgcccagccgtgctgtttttggagttccagtgcctgagcaaactggctagcgtgcatactactcgcgccgatataacgcgctttcccggcttttaccacgtcgttgagggcttccagcgtctcttcgatcggcgtgttgtaatcccagcgatgaatttgcaggatatcgacataatccatgccgagacgtcgcaggctgtcgtcgatagagcgcaaaatttgcgcacgggataatccttccggtaaatcaccaacgcgatggaacactttggtcgcaacgaccacgtcttcacgacgggcgaaatcccgcagtgcgcgaccgacgatctcttcgctgctgccgtcagaataactgttggcggtatcaaagaaatttatgccgccttccagtgcacgtttaattatgggacggctgctttcttccggcagtgtccatgcgtgattaccgcgatctggctcgccaaaggtcatacagccgaggcaaagtcgggaaacgcgaaggtcggtttttcctaaggggttgtattgcatgctgccactcctgctatactcgtcatacttcaagttgcatgtgctgcggctgcattcgttcaccccagtcacttacttatgtaagctcctggggcttcactcgtttgccgccttcctgcaactcgaattatttagagtctatgaataatttcttaagcatagcaggagtggagtagggattatgccagccaggccttgattttggcttccataccagcggcatcgaggccgagttcggcgcgcatttcttcctgagttccttgcggaataaagaagtccggcaggccaatgttcagcacgggtactggtttacgatgggccatcagcacttcgttcacgccgctgcctgcgccgcccataatggcgttttcttctacggtgaccagcgcttcatggctggcggccatttccagaattaacgcttcatcaagcggtttcacaaaacgcatatcgaccagcgtggcgttcaggctttcggcgactttcgccgcttctggcatcagcgtaccaaagttaaggatcgccagtttctcgccacgacgcttcacaatgcctttgccaattggtagtttttccagcggcgtcagttccacgccgaccgcgttgccacgcgggtagcgcaccgcactcgggccatcgttatagtgatagccggtatagagcatctggcgacattcgttttcatcgctcggggtcataatgaccatttccggtatgcagcgcaggtaagagagatcaaaagcaccctgatgggtttgaccgtcagcaccaacaatgcccgcgcggtcgatggcgaacaggaccggaagcttttgaatcgccacgtcatgcagcacctgatcataggcgcgttgcaggaaagtggagtaaatcgcgacaatgggtttgtacccaccaatcgccagacccgcagcaaaggtcaccgcgtgttgctcggcaattgccacgtcgaagtagcgatccgggaatttacgactaaactcgaccatgccggaaccttcacgcatcgccggagtaatcgccatcagcttgttgtctttcgctgccgtttcgcacaaccagtcgccaaagattttactatagctcggcaaaccgccgctacttttcggcaaacaaccgctggagggatcaaatttaggcacggcgtggaaagtgatcgggtctttttctgccggttcataaccacgaccttttttggtcatgatatgcaggaactgcgggcctttcaggtcgcgcatgttctttagcgtggtgataagccccagcacatcgtgaccgtccaccgggccgatgtagttaaagcccagctcttcaaacaacgtgccaggcactaccatgcctttaatatgttcttcggtgcgtttgagcagctctttaattggcggcacgccagagaaaacttttttcccgccttcgcgcagactagagtaaagcttaccggaaagcagctgtgccagatggttgttgagcgcgccgacattttcggaaatgctcatttcattgtcgttgagaatcaccagcatatcaggacggatatcgcccgcgtgattcatcgcttcaaacgccatgcctgcggtaatcgcgccatcgccaatgacacagacggtgcggcgatttttgccttctttttcggcagcaaccgcaataccaattccggcactgatggaggtactactatgcccgacgcttaatacgtcatattcgctttcgccgcgccacgggaacgggtgcagaccgcctttctgacggatggtgccgattttgtcgcggcgtccggtcaaaattttatgcggataagcctgatgccccacatcccaaatcaattggtcaaacggggtgttgtagacatagtgcagcgccacggtcagttcgaccgtgcccagcccggaggcgaagtgcccgctggaacggctcacgctgtcgagtaaatagcggcgcagttcgtcgcagagtttcggtaaactctctttcggcaacagtcgtaactcctgggtggagtcgaccagtgccagggtcgggtatttggcaatatcaaaactcatcaggggcctattaatacttattgtttatttattacgctggatgatgtagtccgctagcgcttccagtgcgctggtatcgagactctgttcagccagttgtttcaggctctgacgggcatcgtcgatcagatcccgggctttcttccgggcttgctcaagacccagaagtgcagggtaggtacttttaccaagttgctggtcggcaccctggcgttttcccaacgttgcagtatctcccaccacatccaggatgtcatcctgaacctggaaggcaaggccgatgctctctgcatacttgtcgagtaccggcagagcacgacgtcctttatctccggcgcttaatgcaccaaggcgaacggcggcgcgaatcaatgcgccggttttatgacgatgaatacgctcaagcgcgtccagaggtacgtgtttgccttccgcgtctaaatctaatgcctgaccaccgcacattccggcaataccactggcgctcgccagttcagaaatcatgctaattctgtcgcggtcgctcacttccggcatatcggcatcgcttaaaatgctgaacgccagcgtttgtaaagcgtcgccagcgagaatcgcgtttgcttcgccaaacttcacatggcaggttggcaaaccgcgacgcagatcgtcatcatccattgccggtaaatcatcatgaattaaactgtaagcgtggatacactcaacggcggcagcgggtgcgtccagcgtgtttgtgctaacgccgaacatatgaccggcggcataaaccaggaaaggtcgcaggcgcttaccacctaataatgcgccatactgcatggtttcgaccacgggagtgttctgaaagggcagtggggcgataaaacggctcagcgcctggttggcctgcttaacgcaggcttcgagttgctgcggaaagtccattactcattgtccggtgtaaaaggggttagagaggcgtcttcattgtcagacagcagaatttgtacgcgctgttcggcttgttgtaatttggcctgcccctgacgtgccagctgcacgccgcgttcgaactcgttcagcgcctcttccagcggcaggtcgccactttccagacgggttacaatctgttccagctcgctcagcgccttttcaaagctggcgggcgcctcatttttcttcggcataatgaatgtctgactctcaatatttttcgccccgtcatggtaacggactcagggcaaatagcaaataacgcgcaatggtaaggtgatgtgcacagcaaagcgatgttagtggtatacttccgcgcctggatgcagccgcaggtgtgggctgctgtatttttccctatacaagtcgcttaaggcttgccaacgaaccattgccgccatgaagtttatcattaaattgttcccggaaatcaccatcaaaagccaatctgtgcgcttgcgctttataaaaatccttaccgggaacattcgtaacgttttaaagcactatgatgagacgctcgctgtcgtccgccactgggataacatcgaagttcgcgcaaaagatgaaaaccagcgtctggctattcgcgacgctctgacccgtattccgggtatccaccatattctcgaagtcgaagacgtgccgtttaccgacatgcacgatattttcgagaaagcgttggttcagtatcgcgatcagctggaaggcaaaaccttctgcgtacgcgtgaagcgccgtggcaaacatgattttagcagcattgatgtggaacgttacgtcggcggcggtttaaatcagcatattgaatccgcgcgcgtgaagctgaccaatccggatgtgactgtccatctggaagtggaagacgatcgtctcctgctgattaaaggccgctacgaaggtattggcggtttcccgatcggcacccaggaagatgtgctgagcctcatttccggtggtttcgactccggtgtttccagttatatgttgatgcgtcgcggctgccgcgtgcattactgcttctttaacctcggcggcgcggcgcatgaaattggcgtgcgtcaggtggcgcattatctgtggaaccgctttggcagctcccaccgcgtgcgttttgtcgctattaatttcgaaccggtcgtcggggaaattctcgagaaaatcgacgacggtcagatgggcgttatcctcaaacgtatgatggtgcgtgccgcatctaaagtggctgaacgttacggcgtacaggcgctggtcaccggcgaagcgctcggccaggtgtccagccagacgctgaccaacctgcgcctgattgataacgtctccgacacgctgatcctgcgtccgctgatctcttacgacaaagagcacatcatcaacctggcccgccagattggcaccgaagactttgctcgcacgatgccggaatattgtggtgtgatctccaaaagcccgacggtgaaagcagttaaaagcaagattgaagcggaagaagagaagttcgacttcagcattctcgataaagtggttgaggaagcgaataacgttgatatccgcgaaatcgcccagcagaccgagcaggaagtggtggaagtggaaaccgtcaatggcttcggcccgaacgacgtgatcctcgatatccgttctatcgatgaacaggaagataagccactgaaagtcgaagggattgatgtggtttctctgccgttctataaactgagcaccaaatttggcgatctcgaccagaacaaaacctggctgctgtggtgtgagcgcggggtgatgagccgtctgcaggcgctctatctgcgcgagcagggctttaacaatgtgaaggtatatcgcccgtaatttgtggtttttacgtcgcatctggtcagatgcgacgtttgccgcatccgacattactcgtaataattataaatccctgccgccatcaccagttgacttgccacttcatgggctttttcacgcccaaccaacaggtcgataattttcagaccaaagtcgatagctgtacccggcccctggctggtcagcaattttacccgtgcatcccagacgacgcgcttgtccagccattgttcggcgggaattttgtctttcagcgtcgggaagccggtcatattaccaatcgggaagatatcgtgcggcaccagcacggtggctggcgcggcgcaaatagccgcgacgatacgcccggaacggtggaactgtttaacggtttcaaccagcagagtgctatcgcgaaaacactccgcgcctttaatgccaccaggcagcacgatcacgtcatattcgccatcagccacttcgaccagcggcgcatccgccagcagcttcacgccgcggctgcaggtaatcgccaggttaccatcgctggcgacgctggcagtggtgactttgataccgccgcgaaccagcagatcgatagtggtgacggcttcagtctcttcactaccaggggcgaggcaaaccagtgcgcttgcgctcatattcactctcctttctttttttaattaccaggggcgaggcaaaccagtgccgatgcgctcatattcactctcctttctttttaccatttcaaacaggcgggtgttttccggtacggcaatcccatgcgcgcgggcgcggcgtaagagaaaaccattgatatagtcgatttcagtgtggcgcagcgcgcggatatcctgcaacatgctgctgatattttccgctgtggcatcaatcacctgcatcacgtaatcacgcaaatcttctgcactagtatgatgcccttcgcgttcgatcaccgccgcgacttcttcgcatatctgcataatttcttgcggatgatgacgtaattcaccgttcgggcaattccagatggcagtcagtggattaatcacgcagttgactgccagcttgcgccacagctcggcgcgaatattgttatgccaggcaacgtcaggcaacacggtttgcaaaatatccgccagataactgtaatccccgtcctgttgccgtgccgggccaatatgcgtgataccgtttgccacatgaataatgacattgccgtcgcggcgggctgcatgggtggtggtgcccatcagtaatggctgctgaatgttttgcaactcttcgatggtgcccatgccgttgtgaattaacagtattggcgtagttacaggcagtgtggacgcgaggcttttgacggcatcggaaacctgccatgctttcagcgtcaccaggagcagatcgctggtggcgagaaaatcgggatcgttggcggtcaggctttcgttaaatatgctaccatctgtctcaaccagattcacgctacaataaggttgcggtacgcgcagccagccctgaacttcatgaccctgtttgcaaagtgctgtaagccataattgccctaaggcaccgcatcccaatacggtaattttcattgttcctcctcacccgcaaccactccgggtgttcaataaggctatcccttaattgtgcatgctgttgcgactatgcacaattaagggatacgtcctggtgcaggactgtcggttatttaactttgcgggtattatgcttcgcatcaaaaatgaagggagaggaaaagatgccatctttcgatattgtctctgaagttgatcttcaggaagcacgtaacgcggtcgataacgcgagccgcgaagtggagtcccgttttgacttccgtaacgttgaagccagttttgagctgaacgacgccagcaaaaccatcaaagtgttgagcgagtccgatttccaggtcaatcagttgctggatattctgcgtgccaagctgctgaagcgcggcattgaaggcagtagcctggatgtaccggagaatatcgttcatagcggtaaaacctggtttgtggaagcgaaactgaaacagggcattgagagcgcgacccagaagaaaatcgtcaagatgatcaaagacagcaaactgaaagtgcaggcgcaaattcagggcgatgaaatccgcgtaacgggcaaatctcgtgatgatttgcaggctgtcatggcgatggtacgtggtggcgatctcggtcagccgttccagttcaaaaacttccgcgattaatcgcgactatgtgcgttttgttcatgtcagatgcggcatgaacgcctgattcggcctacaaaggtttgtaattcagaaactttgtaggcctgataagcgtagcgcagcaggcaattcgccgcgttttttatgcctgacgaattgcctgttctatctcaaagcgattcgtcactttgctgtcgattttcacataagcactatgttcttcttctgcaatcaacacttctttgatgccttcagtttctagcaaacgcacttttaacgcctcgtttgcggcaatgttcgccgggatttcaatgcgcaaactgctgacatacggcggttctttcatggtactggcgactgtcagccacactgcggccagcattgcgccagcgagaaataccccctgaccgtcaaacatgccgttaatccagccgcccaggctaccgccaatcgccacgccaagaaactggctggtggagtaaacacccatcgccgtacctttgtaacctgctgggctctctttactgataagactgggcaggagggcttccatcaaattaaacgccacaaagaaaagctgcacgccgaccaccagttgccagaactgcgtttgcgcgttccacaacacaatttccgcaaccacgatcaacccgacgcagaagacaaagacttgcttcattttgcgcttaacttcagcgtagataatgaaaggcacgacgctgccaaaggcgattagcattgtcgccagatagaccttccagtgttcagccgccgggaaccctgcatcagccagttgtccgggcagggcaacaaacgtgctcatcagcaaaatatgcagacacataatgccaaagttgagtttcagcagccgcggttccgccagcactttactgaaactgcctttcaccattccggactcacgattaagtacgtgagtgctactgttgggcacaacccaaatggtcaacgcaatgccggtcgttgccagaatagcgatcatccagaacagcgcgtgcagcccaagtttgtgagtgatgatcgggccaagcaccatcgcaatggcaaaggtaatgccaaagctcacgccgataaacgccatcgctttggtgcggttttgttcgcgcgtgagatcggaaagcagcgccataacggcggcggcaattgctccagagccttgtagcgcccggcccagaataattccccagatggagtcggaaagcgcagcgataacgctaccggcggcaaacaccgccagcccaccgacaattaatggtttgcgaccaatgcggtcggaaagcaggccaaacggaatctgaaaaacggcctgagtcagaccataaataccaatggcaataccgattaatgcttcgctggcaccttgcagagccatgccgtacgtggtcagaaccggcagaaccataaacatgcccagcatgcgcaagctgaatacggtccctaaaccccaggtcgcgcgcctctcacctggcgtcattttataatcgttcattaccacctctgttttaaattcgcgactagtgtaaagcggcaaacgaatggggtaaacatgcggattttttagtaaatatttcgagagggatatgtttctaatgctaagaaaaaaggtgccgtagcacctttttaatagagaggttttgttaccacacagcagccagcagcgtatggctgtccggtaccataaaatcaacggacatcatcacgctgagggcagtgatggcgatgatagagaagccgaacagcttgcgcgcccagattctgtcatcagcaactttataaccgcgcagagccatacctaaccaccagacgctaaccgccgcggcgaccaccagatatttatacccagcgtaaccgccaagagagagcatcagcgtggcaacggcaaaggcgatgatatacagcgtgatgtgattcttcgccacgctaatgccttttaccactggcaataccggaatgtttgccgcctggtaatccttaaagcggaaaatggcgatggcataggagtgaggcatctgccacaggctgaagatagccagcaggatcgctgcgccgctatcgaactcaccggttaccgcacagtagccgatcaccggcggcgcagcgccggagaggctaccaatcaacgtgccgtagacagagtggcgtttcatgtacaggctataaacgccgacataaaccacaaagcccatcacccccagccagcaggccagcggattcgcgccaaaccacagcagcataaagccagcaatacccagcaacgtggcgtacaccaggctgacagcaggagagatcaggcctttcaccagcacccgattcttcgtcctttccatctttctgtcgatatccctgtcgatgtagttgttaaacacacaaccgctcgccacaaccagactcaccccaaccagcgtgtagataaacaggggataatcaatgctgcccttactggccagcaggaatcccccaatcacgctgatcaggttgccaaagatgatgcctggtttcgttacttgcaggtattgcttaaacatcataaccgccgctcttagtgcatcatcatgttgtagttgaggttccacataatccagatggagcctacaaccaggatagcgatgattagcacggtgaagacaaacgccgtcatgttccagccttcatcacttttggtattcatgtgcaggaagcacaccagatgcaccagaacctgtaccactgccattgccaggattgttcccagaattacggccggagaggcagctcctgtcatcaccatccagaacggaatcaccgtcagaatgatgctcaggataaagcctgtcatgtaggtttttacgctgccatgggacgcgccgctgtgatcggtagaatgactcattacatcgcccccatcagataaacaacagtgaacacacagatccaaaccacatccaggaagtgccagaacaggctcaggcacatgatgcgggtacggttagtgctggtcaggccgcgacgggcgatttgcaccatcagcaccgccatccagataagaccagaagtgacgtgcagaccgtgcgtgccgaccagcgcaaagaacgcactcaggaagccgctgcgatccggacccatgccgttaacaatcaggtgatggaattcatagatttccatcccgataaatccggcaccaaacaaccaggtcaacgccagccaggagataacctggcttttgttgtttttgtacatggcgatagccgccatgccgtaggtgatggagctgaacaacagcaagaaagtttcaaccagaacgaacggcagttcgaaaatgtccttacctgtcgggccgcctgcggtgccgttcaccagaacggcataggtagcaaacaagatagagaacagaatgcagtcgctcatcaggtagatccaaaatccgaagattttggttccgcctgcatcgtggtgcccgtgttcgtgcgcgtgggcagtcgcgtgcgtcaaagtatcagttgccatttttcagccctgccttagtaatctcatcgaaatgctggttttccagtttttcgatttctgccaccggcacgtagtaatccacgtcctcgtcgaagcttttcacgatccaggtgatgatcatgcctgcgaagccaacaatcgccagccaccagatatgccagatcatggcgaaaccgaagatggtggagaaagctgcaatgacgatacctgcaccgctgtttttcggcatatgaatttcttcatagtggtcaggctttttatacgcttcgcctttctctttcatttcccagaatgcatcacgttcgtgaacgtgcggcactacggcaaagttatagaacggaggcggggaagaggttgcccactccagcgtacggccaccccacgggtcgccagtcaggtcacggttctggtcgcggtcgcgaatagaaacgtacatctgaataacgaggcagagaatacccagcgcaatcagtactgcaccgctggctgcaatcatcagcatggtgtggaactgcgggtcaatctgctggctcaaacgacgggtcatgcccatgaagcccagcgcatacagtggcataaaggcaacgaagaagccgatgatccagaaccagaacgcgcgtttaccccaggtttcgttcagtttgaaaccgaacgctttaggccaccagtaggtcatccctgcgaagcagccgaagaccacgccgccgatgatcacgttatggaagtgcgcaatcaggaacaggctgttatgcagaacgaagtccgcgcccggtacggccagcagcacgccagtcatcccgcccacgctgaaggtgacgataaaaccgatggtccacagcatcgcagaatggaacacgatgcggccctgatacatggtgaacagccagttgaagatcttcaccccggtcgggatggcgataatcattgtggtgataccaaagaaggcgtttacgttcgcgcccgcacccatcgtaaagaagtggtgcagccaaacgatgaagctcagcacggtgatacaggcggttgcccataccaggctggtataaccaaacagacgtttacggctgaaggttgccgcaatttcggagaacacaccgaaaacaggcaggatcaggatgtaaacttccgggtggccccaggcccaaatcaggttgatgtacatcatcatgttgccacccatatcgttggtaaagaaatgggtgcccagatagcgatccagggtcaacaacgcgacggtaaccgtcagaattgggaaggaagcaataatcagtacgttcgcgcacagacttgcccaggtaaatactggcatcttgaacatggtcatgcccggtgcgcgcatcttcagaatggtaacgaagaagttgataccggtaagcgtcgtacctataccggatagctggagactccatatccagtaatcgacaccgactcccggactgtactctattccgcttagcggtggataggccagccagccggtctgcgcaaattcgcccacgccgagagaaacgttaaccagaatcacaccaacaacggtaaaccagaagcttaagttgttgaggaacgggaacgcaacgtcacgcgcgccgatctgcagcggaaccaccaggttcatcagaccgataacgaaaggcatcgccacgaagaagatcataatcacgccgtgcgcggtaaagatctgatcgtagtggtgaggtggcaggaagcccgcttcgcccgcgctggcaagagcctgctggctacgcatcataatggcgtcagcaaaaccacgcagcaacatcacaatcgccacgatgatatacatgataccgaggcgtttatggtcgacggaggtcagccactctttccacaggtaggtccacttaccgaagtaagtgatcaggccaacgagcgccagacctcccaaaataatgccagcgatcgtaaccatgacgataggttcatggaacgggactgcatcaagacttaattttccgaacatctttattcttcctcaacccctttaatgggcggattccgcgtggctcatgtccatgccttccataccttcgtgtgcgctgtgctcaccttctggctgggtcatgtccatgctcttaccgtgagccataaacttgttaattacatcggcaaacaagtctggtttcacgttggagaaatattccacctggttgtattcgctaggcgcggccagtttttcgaacgcagccatgtcagacatggtgttcgggctctgcttcgcttttgcgacccactggtcgaatgcggcgcgatccggtgttgcaatagctttgaacttcatgccactgaagcccgggccgctgtagctggcggagataccgtcataagtgccgggttcgttggcgatcagatgcaggcgagtctgcataccggccatggcataaatctggctacccagacgcggaatgaagaaggagttcatcacggagttggaggtcactttgaagtacaccggagtgttcgccgggaaagcgatttcattcacggtagcaatgccctgttccgggtagatgaagaaccatttccagtccatggaaaccacttcgatggtaatgggcttctcgtcgtgtgccagcggcttgctaggctcaagagcgtgagtggttttccaggtcagtactgcaaggaagatgatgattaagataggtaccgtccagaccacagcttccactttattggagtgactccagttcgggctgtacttagcatctttattgctcgcacggtacttccaggcgaaaccaacagccatcaagattgcgggaataacgacaatcaacatcaggccaaatgccgtcagtatcagactacgttgctccagaccaatctgtcctttgggatctaacagcgcagaattacagccactgagcaatacagtgcctgcaaataaactcaaccatcccaaacttttattgtatttcctgagtctcatttaacgacctcaattccacgggatctggtggcgtttaaagtgtgtgggcattttacgggaaggttacattactgtaaacatgattaaattcctgttacttggatttggctgccaggtcacatatgttgcaaaacatatcaggttgattttaagaagctgttgcaaaagggcgttataacaaaaggggagtgctgaaggagtctgggcgggcaattggtataaccaatgtgaaataaaacaattatttaacaaataattatcattagagtgacaactgggtgatgagaaaataaagactcattagctgaatcgtgtaagaaaaatagaatttataaatggcgccaataatttccaaacgctaagccgcacaaaagaacaaatattaataagcgatactgatgtttatttagccgtaataattacggcgagtgattactacagctaaataatatttacagattacgtcagatgcgtttttcgtagcgccagataatccagcaaaccaccaagcacgacgccagaaagggcgactaaaaccccgacttccagcagagcaggcaggaaagagaagtgcgtcaaatccagcgcgtccatcgtcaatagcagtaaccacacggccaacaggctgacgcccgccgccagtgtccacatggcaaaggcataacctgccggatatgcggtacgggagataaagttgtcatttactcgtgtatattcaagcgtctggcggcaaaccagcagcaaaataagccctggtacggcagcggcgacggagaatagatagaatgtgctccagccgtgtgcttcaacaaaccaacccgccacggggccgacataaactcgccctacagcagaaagcgcactgagcagggcaaattgagtagcggaaaaactcttattacatagcgtcattaacagcgcgacaaaggcacttgtgcccatcccgccacagaggttttcgaaaaagacggctgcgcccatgctgtagagatgcttatcagtaatgctcagcagccagtaaccggcgttagacgcaccttgtaaaatgccgaaaatcagcagtgcccggaacagactcaggcgctgcatcaaaatcccaccgtacaatgcgccaacaatggtcgctagtaagccaagcgttttgttaaccacgcctacttcacccgcatcaaacccgacgccgcgaatcaaaaacgtggttgtcaggctcatggcgaatgcgtcgcccagcttatacagcacgataagaagcaaaataagccaggcattattgcgaccaaagaaatctcgcagaggtgcaacaaccgcttgttccagcgttttgggcacaggaatggtgtcggttggttctggtgcaagcaacgtcgcgataatacaggggatcaacagtgccgccattaaccagtacatgccctgccagcccagccatttatctgccagccacagggctaggccgccggaaaccagcatccctaaacggtaacccagcacgctgattgccgcgcccgcaccacgttcttctgccggaagcacatcggttttccacgcatcgaagactatatcctgggaagcagagcaaaaagcgatcaccactgccagcgccgccatccagcggagttgggtgcctggttcgagaaaacccatcgccgcaatggcgactaataacaggatttgcgtggcgagcagccaaccgcgccgccgcccaaaaaatggaggcgtgtagcggtccatcagcggactccagaggaatttaaaaacgtaagcctggcctaccagagagaagaaaccaatggttttgagatcgatattctcgaccgtcatccaggcctgtaaggtaccggatgtcagggcgagcggtagcccggaagcaaaacccaggatcagcaatatggcactacgcggctgttgaaaaatacgtaaatattgactggacatgggcgtctacaggcccggcttgcaccgggccagagggcagaaattaacgcgcgttctgcttgatgaattcgtggatgctggtgtcctgagacatatcagcgatggtatcggtcagcacactgttaaccgcatcggcgatatttttgttggaggcctggaacgcaccttcaacgttgtagctggcacgatagtttttggtcattttgttgccattctgcgcggtagcgatgatggcgatatccgctttggtcgcgatgttgtagcgcacgttgccctgggacacgtcagcatacagttggctaacgatgatttgcagattaaccgggccattcggaccaaccatgtaaccacgcgcggtcatctgtttttccagcacttcttgcagcaggaaacgcagatcgcgggaggcggtcagggtaacgatttgattatcgcgggtgacttttgccagcgcctgatcggtacgctgatcggcaccattaatgcttacggtgacgcccatcaggcttggatcctgctgtggcagtgtaatcgtcggggaaacttcaatagttgttggcggttttgcgcatcctgcaagcataaacagagcaactaacgggaagaggatttttttgaacatgttcgggctctcagagactcttaagcgtgtttggtaaaaattcccgccatcataacattgccaacggcgaggggaagtgggtaaggcatgtaaattcatcatgttgacgaaataatcgcccctggtaaaagaaacactgatgcgaggcctgtgtttcaatctttaaatcagtaaacttcatacgcttgacggaaaaaccaggacgaaacctaaatatttgttgttaagctgcaatggaaacggtaaaagcggctagtatttaaagggatggatgacatctcagcgttgtcggaggagatatttcatgatgatacgtgagcggatagaagaaaaattaagggcggcgttccaacccgtattcctcgaagtagtggatgaaagctatcgtcacaatgtcccagccggctctgaaagccattttaaagttgtgctggtcagcgatcgttttacgggtgaacgttttctgaatcgtcatcgaatgatttacagtactttagcggaggaactctctactaccgttcatgcgctggctctgcatacttacactattaaggagtgggaagggttgcaggacaccgtctttgcctctcctccctgtcgtggagcaggaagcatcgcgtaaaaacgcatttgcaactgtcggcgcttttccagtatgttgctaaagattttatgaaaaacggcctgcgggccgttttgttttgtctggattttgcgctttttgcccagcattcagacgaaaattgcccgggaattgtgaaaaaatacgcgacagcgcgcaataaccgttctcgactcataaaagtgatgccgctataatgccgcgtcctatttgaatgctttcgggatgattctggtaacagggaatgtgattgattataagaacatcccggttccgcgaagccaacaacctgtgcttgcggggtaagagttgaccgagcactgtgattttttgaggtaacaagatgcaagttagtgttgaaaccactcaaggccttggccgccgtgtaacgattactatcgctgctgacagcatcgagaccgctgttaaaagcgagctggtcaacgttgcgaaaaaagtacgtattgacggcttccgcaaaggcaaagtgccaatgaatatcgttgctcagcgttatggcgcgtctgtacgccaggacgttctgggtgacctgatgagccgtaacttcattgacgccatcattaaagaaaaaatcaatccggctggcgcaccgacttatgttccgggcgaatacaagctgggtgaagacttcacttactctgtagagtttgaagtttatccggaagttgaactgcagggtctggaagcgatcgaagttgaaaaaccgatcgttgaagtgaccgacgctgacgttgacggcatgctggatactctgcgtaaacagcaggcgacctggaaagaaaaagacggcgctgttgaagcagaagaccgcgtaaccatcgacttcaccggttctgtagacggcgaagagttcgaaggcggtaaagcgtctgatttcgtactggcgatgggccagggtcgtatgatcccgggctttgaagacggtatcaaaggccacaaagctggcgaagagttcaccatcgacgtgaccttcccggaagaataccacgcagaaaacctgaaaggtaaagcagcgaaattcgctatcaacctgaagaaagttgaagagcgtgaactgccggaactgactgcagaattcatcaaacgtttcggcgttgaagatggttccgtagaaggtctgcgcgctgaagtgcgtaaaaacatggagcgcgagctgaagagcgccatccgtaaccgcgttaagtctcaggcgatcgaaggtctggtaaaagctaacgacatcgacgtaccggctgcgctgatcgacagcgaaatcgacgttctgcgtcgccaggctgcacagcgtttcggtggcaacgaaaaacaagctctggaactgccgcgcgaactgttcgaagaacaggctaaacgccgcgtagttgttggcctgctgctgggcgaagttatccgcaccaacgagctgaaagctgacgaagagcgcgtgaaaggcctgatcgaagagatggcttctgcgtacgaagatccgaaagaagttatcgagttctacagcaaaaacaaagaactgatggacaacatgcgcaatgttgccctggaagaacaggctgttgaagctgtactggcgaaagcgaaagtgactgaaaaagaaaccactttcaacgagctgatgaaccagcaggcgtaatttacgcagcataacgcgctaaattcgcacaaaggcccgtcaccgccaggtggtgggcttttttttgtcatgaattttgcatggaaccgtgcgaaaagcctctttcggtgttagcgtaacaacaaaagattgttatgcttgaaatatggtgatgccgtacccataacacagggactagctgataatccgtccataaggttacaatcggtacagcaggttttttcaattttatccaggagacggaaatgagttacagcggcgaacgagataactttgcaccccatatggcgctggtgccgatggtcattgaacagaccagtcgcggtgagcgctcttttgatatctattctcgtctacttaaggaacgcgtcatttttctgactggccaggttgaagaccacatggctaacctgattgtggcgcagatgctgttcctggaagcggaaaacccagaaaaagatatctatctgtacattaactccccaggcggggtgatcactgccgggatgtctatctatgacaccatgcagtttatcaagcctgatgtcagcaccatctgtatgggccaggcggccagcatgggcgctttcttgctgaccgcaggggcaaaaggtaaacgtttttgcctgccgaatagccgcgtgatgattcaccaaccgttgggcggctaccagggccaggcgaccgatatcgaaattcatgcccgtgaaattctgaaagttaaagggcgcatgaatgaacttatggcgcttcatacgggtcaaagtttagaacagattgaacgtgataccgagcgcgatcgcttcctttccgcccctgaagcggtggaatacggtctggtcgatagcattctgacccatcgtaattgatgccagaggcgcaactgtgccgctatacttatccagggcggcacaacgctgtaagcggcttgcgcctgagaatggcatttgcgtcgtcgtgtgcggcacaaagaacaaagaagaggttttgacccatgacagataaacgcaaagatggcagtggcaaattgctgtattgctctttttgcggcaaaagccagcatgaagtgcgcaagctgattgccggtccatccgtgtatatctgcgacgaatgtgttgatttatgtaacgacatcattcgcgaagagattaaagaagttgcaccgcatcgtgaacgcagtgcgctaccgacgccgcatgaaattcgcaaccacctggacgattacgttatcggccaggaacaggcgaaaaaagtgctggcggtcgcggtatacaaccattacaaacgtctgcgcaacggcgataccagcaatggcgtcgagttgggcaaaagtaacattctgctgatcggtccgaccggttccggtaaaacgctgctggctgaaacgctggcgcgcctgctggatgttccgttcaccatggccgacgcgactacactgaccgaagccggttatgtgggtgaagacgttgaaaacatcattcagaagctgttgcagaaatgcgactacgatgtccagaaagcacagcgtggtattgtctacatcgatgaaatcgacaagatttctcgtaagagtgacaacccgtccattacccgagacgtttccggtgaaggcgtacagcaggcactgttgaaactgatcgaaggtacggtagctgctgttccaccgcaaggtgggcgtaaacatccgcagcaggaattcttgcaggttgatacctctaagatcctgtttatttgtggcggtgcgtttgccggtctggataaagtgatttcccaccgtgtagaaaccggctccggcattggttttggcgcgacggtaaaagcgaagtccgacaaagcaagcgaaggcgagctgctggcgcaggttgaaccggaagatctgatcaagtttggtcttatccctgagtttattggtcgtctgccggttgtcgcaacgttgaatgaactgagcgaagaagctctgattcagatcctcaaagagccgaaaaacgccctgaccaagcagtatcaggcgctgtttaatctggaaggcgtggatctggaattccgtgacgaggcgctggatgctatcgctaagaaagcgatggcgcgtaaaaccggtgcccgtggcctgcgttccatcgtagaagccgcactgctcgataccatgtacgatctgccgtccatggaagacgtcgaaaaagtggttatcgacgagagcgtaattgatggtcaaagcaaaccgttgctgatttatggcaagccggaagcgcaacaggcatctggtgaataattaaccattcccatacaattagttaaccaaaaaggggggattttatctcccctttaatttttcctctattctcggcgttgaatgtgggggaaacatccccatatactgacgtacatgttaatagatggcgtgaagcacagtcgtgtcatctgattacctggcggaaattaaactaagagagagctctatgaatcctgagcgttctgaacgcattgaaatccccgtattgccgctgcgcgatgtggtggtttatccgcacatggtcatccccttatttgtcgggcgggaaaaatctatccgttgtctggaagcggcgatggaccatgataaaaaaattatgctggtcgcgcagaaagaagctagtacggatgagccgggtgtaaacgatcttttcaccgtcgggaccgtggcctctatattgcagatgctgaaactgcctgacggcaccgtcaaagtgctggtcgaggggttacagcgcgcgcgtatttctgcgctctctgacaatggcgaacacttttctgcgaaggcggagtatctggagagcccgaccattgatgagcgggaacaggaagtgctggtgcgtactgcaatcagccagttcgaaggctacatcaagctgaacaaaaaaatcccaccagaagtgctgacgagcctgaatagcatcgacgatccggcgcgtctggcggataccattgctgcacatatgccgctgaaactggctgacaaacagtctgttctggagatgtccgacgttaacgaacgtctggaatatctgatggcaatgatggaaagcgaaatcgatctgctgcaggttgagaaacgcattcgcaaccgcgttaaaaagcagatggagaaatcccagcgtgagtactatctgaacgagcaaatgaaagctattcagaaagaactcggtgaaatggacgacgcgccggacgaaaacgaagccctgaagcgcaaaatcgacgcggcgaagatgccgaaagaggcaaaagagaaagcggaagcagagttgcagaagctgaaaatgatgtctccgatgagcgcagaagcgaccgtagtgcgtggttatatcgactggatggtacaggtgccgtggaatgcgcgtagcaaggtcaaaaaagacctgcgtcaggcgcaggaaatccttgataccgaccattatggtctggagcgcgtgaaagatcgaatccttgagtatcttgcggttcaaagccgtgtcaacaaaatcaagggaccgatcctctgcctggtagggccgccgggggtaggtaaaacctctcttggtcagtccattgccaaagccaccgggcgtaaatatgtccgtatggcgctgggcggcgtgcgtgatgaagcggaaatccgtggtcaccgccgtacttacatcggttctatgccgggtaaactgatccagaaaatggcgaaagtgggcgtgaaaaacccgctgttcctgctcgatgagatcgacaaaatgtcttctgacatgcgtggcgatccggcctctgcactgcttgaagtgctggaaccagagcagaacgtagcgttcagcgaccactacctggaagtggattacgatctcagcgacgtgatgtttgtcgcgacgagcaactccatgaacattccggcaccgctgctggatcgtatggaagtgattcgcctctccggttataccgaagatgaaaaactgaacatcgccaaacgtcacctgctgccgaagcagattgaacgtaatgcactgaaaaaaggtgagctgaccgtcgacgatagcgccattatcggcattattcgttactacacccgtgaggcgggcgtgcgtggtctggagcgtgaaatctccaaactgtgtcgcaaagcggttaagcagttactgctcgataagagtttaaaacatatcgaaattaacggcgataacctgcatgactatctcggtgttcagcgtttcgactatggtcgcgcggataacgaaaaccgtgtcggtcaggtaaccggtctggcgtggacggaagtgggcggtgacttgctgaccattgaaaccgcatgtgttccgggtaaaggcaaactgacctataccggtagcctcggcgaagtgatgcaggagtccattcaggcggcgttaacggtggttcgtgcgcgtgcggaaaaactggggatcaaccctgatttttacgaaaaacgtgacatccacgtccacgtaccggaaggtgcgacgccgaaagatggtccgagtgccggtattgctatgtgcaccgcgctggtttcttgcctgaccggtaacccggttcgtgccgatgtggcaatgaccggtgagatcactctgcgtggtcaggtactgccgatcggtggtttgaaagaaaaactcctggcagcgcatcgcggcgggattaaaacagtgctaattccgttcgaaaataaacgcgatctggaagagattcctgacaacgtaattgccgatctggacattcatcctgtgaagcgcattgaggaagttctgactctggcgctgcaaaatgaaccgtctggtatgcaggttgtgactgcaaaataatgacctcgcgcaaaatgcactaataaaaacagggctggcaggctaattcgggcttgccagcctttttttgtctcgctaagttagatggcggatcgggcttgcccttattaaggggtgttgtaaggggatggctggcctgatataactgctgcgcgttcgtaccttgaaggattcaagtgcgatataaattataaagaggaagagaagagtgaataaatctcaattgatcgacaagattgctgcaggggctgatatctctaaagctgcggctggccgtgcgttagatgctattattgcttccgtaactgaatctctgaaagaaggggatgatgtagcactggtaggttttggtacttttgccgttaaagagcgtgctgcccgtactggccgcaacccgcagaccggtaaagagatcaccatcgctgctgctaaagtaccgagcttccgtgcaggtaaagcactgaaagacgcggtaaactaagcgttgtccccagtggggatgtgacgaagttcaagggcgcatctactgatgtgccttttttatttgtattcggtgactttctgcgtcttgtgggctgacaattgcccccgtttcttgtcacaataggcctttgcgcgcatcgatacgttgcgtgaggtacacagtcatctacagcggagtgttgttacaccatgatggacagcttacgcacggctgcaaacagtctcgtgctcaagattattttcggtatcattatcgtgagcttcatattgaccggcgtgagtggttacctgattggcggaggcaataactacgccgcaaaagtgaatgaccaggaaatcagccgtgggcaattcgagaacgccttcaacagcgagcgtaatcgcatgcagcaacagctgggcgatcaatactccgagctggcagcgaacgaaggctatatgaaaaccctgcgtcaacaggtgctgaatcgtctgatcgacgaggcgctgctggatcagtacgcacgtgagctgaaactgggtatcagcgatgagcaggttaaacaggcgattttcgcgaccccagccttccaggttgacggcaaatttgataacagccgctataacggtatcctcaaccagatggggatgaccgccgatcagtacgcccaggcgctgcgtaaccagctcactacccaacagctgattaacggcgttgccggtaccgattttatgctgaaaggtgaaaccgacgagctggcggcactggtcgcgcaacaacgcgtggtgcgtgaggcgactatcgatgttaacgcgctggcggcgaagcagcctgtgaccgaacaggagattgccagctactacgaacaaaacaaaaacaatttcatgacgccggaacaattccgcgtgagttacatcaagctggatgccgcaacgatgcagcaaccggttagcgatgcggatatccagagctactacgaccagcatcaggatcaattcacccagccgcagcgtacccgctacagcatcatccagaccaaaactgaagatgaagcgaaagcggtacttgatgagctgaataaaggcggtgattttgctgcattagccaaagaaaaatctgccgatattatctctgctcgtaacggcggcgatatgggttggttagaagatgccactatcccggacgaactgaaaaatgctggtctgaaagaaaaaggccaactgtctggtgtcatcaaatctagcgtcggtttcctgattgtacgtctggacgacattcagccagcgaaagtgaaaagcttagacgaagtacgtgacgacattgcggcgaaagtgaaacacgaaaaagccctcgatgcgtactacgcgctgcagcagaaagtgagcgatgcggcaagcaacgacaccgagtctctggccggtgcagagcaagctgccggcgttaaagccactcagacgggttggttcagcaaagataacctgccggaagagttgaacttcaagccggttgccgacgctatctttaacggcggtctggtaggtgaaaacggcgcgccgggcatcaactctgacatcatcaccgtagacggcgaccgcgcattcgtgctgcgcatcagcgagcacaaaccggaagcggtgaaaccgttggcagatgttcaggaacaagttaaggcattggttcagcacaacaaagctgaacaacaggcgaaagtggatgctgagaaactgctggttgatttgaaagccggcaaaggtgcggaagctatgcaggctgccggtctgaaatttggcgagccgaaaaccttaagccgttccggtcgtgacccgattagccaggcggcgtttgcactgccactgccagcgaaagacaaaccgagctacggtatggcgaccgatatgcaaggtaatgtggttctgctggcgctggatgaagtgaaacaaggtagtatgccggaagatcagaaaaaagcgatggtgcagggtatcacccagaacaacgcacaaatcgtctttgaagctctgatgagtaacctgcgtaaagaggcgaaaatcaaaattggcgatgcgctggaacagcaataatcctgaagccgcctcgcaaaaaaatgcgttgcagctgtaacaagaaaaggtcgctttcgcggccttttccatttctgaacattgccatttgtttactgttttcactgccgttaaggtgattccactgttaacaaacaaggagaaaacagtatgaaacacggaattaaagcactgctcattaccctgcccctggcctgtgccggaatgtctcatagcgcgctggcggcagcttctgtggcgaaaccgacggcggtagaaaccaaagcggaagctcctgcagcacaaagtaaagcagcagtaccggcgaaagccagtgacgaagaaggcacccgggtcagcattaataatgccagcgcggaagagctagcccgcgcgatgaatggcgttggcctgaagaaagcgcaggcgattgtcagttatcgcgaagagtacggtccgtttaaaactgtggaggatctaaagcaggtgccggggatgggcaatagcctggtggaacgtaatctggcggtattaaccctgtaattaatttgcatagtggcaattttttgccagactgaagaggtcataccagttatgacctctgtacttataacaacaacgtaaggttattgcgctatgcaaacacaaatcaaagttcgtggatatcatctcgacgtttaccagcacgtcaacaacgcccgctaccttgaatttctcgaagaagcccgctgggatgggttggaaaatagcgacagttttcagtggatgacggcccataacatcgccttcgtcgtggtcaatatcaatattaactatcgtcgcccagcggtattaagtgacctgttaactattaccagtcagttgcagcaattaaacggtaaaagcggcatcttaagccaggtcattacactggagccggaagggcaggtggtagcggatgcgcttattacgtttgtttgtattgatcttaaaacgcagaaagcattagctctggaaggggaattgcgcgaaaagctggagcagatggttaagtaaacgttttgtggtgccggatgctcaagccgcatccggcgacacccggaataattacctcaacccggttttctgcttcatcgctgccatcaccgtcggtttatcggccagataatgattcaaaccgttggcgcgtaaattacatgccgcacaatgaccgcaaccgtcgcctttaaagccgttatagcaggtcaacgtttcgttacggactaaatccagtttgccgtaataatctgccagcgcccaggtttccgctttatcaatccacatcagcggcgtttcaaaacgaatatctttcgccatgcccaaactgacggcatggtttagtgctttcacaaactcatcgcggcaatccgggtagccggagaaatccgtttcgcagacgccagtaattacggcttctgcttttacctgatacgcatatattgccgccagcgtcaggaacaaaatattacgccctgggacaaacgtattcgggataccatcggcttcaggttcataatcaggcaccggaatgctgtcacgcgtcaggctactgaccgccagctcgttgagcagggtgacatccagcaccttatgcgcgcgtgcccccagtttcagcgccagttcgcgtgccacgtcgatttctgcgcgatgccgctgaccgtaatcgaacgtcacgcaatggacttcatcatattgttgtaatgcctgcaccagacaggtggtggaatcctgacctccactgaacacaacgacagcacgtttcatagataatcctgcttgaacaataaaagcgttatggtaacgcctgcgattaacccggaccagctattcattggcttggcgcgggaagccaggcttcggtaaattcaaaccagccgcgcggtgtcagtcgcacaccgttcacgccgggaggggcactaatgcgatagtgatagttgaacagcggcgtcagcgtcgcatctgtcattaactggctaaaaaccgctttcagggcattaaatcggttttcttcatcaggcattatttgcacggcatccagtgtgctttgtagatgtgcgtatgctggagcgtcgaaaacatgtggccacagcggatcgcagcgcagccattgctccagagtatattccggtgcttcgccaattaatctgtcgcccatcatgaggtctgcgtgtgcctgtagggtcgtgtcgtcccagttttttgcgttatgaaaaataattgtgagttcacagccttccgctgccagtgtcgcctgtaggcgttctgccatggtatgaagttctatcggtaggtgataaaccagcgtcaaggttttcggtagtttgacttcatccggtacctgccaatgcggaatagtccagcctggcagtaatgcatgactggcggtgatcaggttttctccgacttctaacgtttgtaataaaccggattgatgaataatggagatcacttttcgcgcctgccagagggagagtcggggacttttgcgcaacgtcaaatagcaaaaacctaaactgatgccgctactgacctggctgacccgttgcagctcctccggtttgccgatggtgatttgcacgggatgccgacaactggttcccaaatctttttcgaaaagcggcggagttatccagtactcaaccgctttaagcagcggatgacgtaaatggtaataatcatggctttccaggcgcaccagctctgctgtgaattgtgttaagcgaaaaggacccgtgccgatcagtgggaattgcggatgcgccagatggctgcaatagctcgccagccggtgcgcaagccagtaatcagggcgatgtaaaaagaaggtcagacactgcggatgggtgacttcaatacgcttcacgctaataaataattgatccagtgctggcagttgtaacagcatcaataatcgctggtgtaagtgactggcttttactgcatcgccgttatgccagtgtagggtactacgaagataaaagtcccagcgtaacccgtcagtagaggtttcccagtgatgcgctaaatcgccaatcgggcgctgagtattattatcgaagcgggtcaggccggaaaatatctgcccggcgagatgctgctcggcacggccgggcaaaaagcctggttgtagcggttcgagcgggcgatagtagggaatacgcaacgtgggtgtatcgttttgccattgtccgcccataaacggctgtaacagagtgcgcagctcacctggggccagttgcgccagctccagcacatcttgctgctttccggtttccagtgcctgttccatcatcgcattgcgtaggctttccggcgtgaccagaaagcgtaattgtccgcgctttccgcgtccactctgcgcctgccactccagccatcccgcctcctgtgcctgacgcaacagcgtacgaacatggcgttcgctgcaaaaacagcgttcggccagttcgctgacggtgacggtttgcggctttccggcggaaggttgccacagacgttgatactggttaagacggttgagcaatcgcatataaacccggaacaatattatttaactattcactattacttccgtatatatcaggtgatactcaatcaccattaaccgtgtcacagagtggagaaagaaatggctcgtctggcagcatttgatatggatggcactttattgatgcccgaccatcatttaggtgagaaaaccctctctactttggcgcgactgcgtgaacgcgacattaccctcacttttgccacggggcgtcatgcgctggagatgcagcatattctcggggcgctaagcctggatgcgtatttgattaccggcaacggaacgcgcgtgcattctctggaaggtgaacttttacatcgtgatgatttacctgcggatgtcgcggagctggtgctgtatcagcaatgggatacccgagccagcatgcatatcttcaatgacgacggttggtttaccgggaaagagatccctgcgttgttgcaggcatttgtctatagcggttttcgttatcagataatcgatgtcaaaaaaatgccactcggcagcgtcaccaagatctgcttctgtggcgatcacgacgatcttacacgcttgcagatccagctatacgaagcattaggcgagcgtgcacatttgtgtttttccgccacggattgcctcgaagtgctgccggtgggctgcaataaaggcgctgcattgacggtgctgacccaacatttaggtttaagcttgcgcgattgcatggcctttggtgatgcgatgaacgatcgcgaaatgttagtcagcgtcggtagcggatttattatgggcaatgcgatgccgcaactgcgcgcggagctcccgcatttaccggtgattggacattgccgaaatcaggctgtctctcactatttgacgcactggctggactatccacatctaccttattcccccgaataacgagatcccttccagcaccgggcaattgcccggttttttttgcgttgaatttgtcattttgtgccgtggtgtttaaaccgcacagaataaattgtcgtgatttcacctttaaaataaaattaaaagagaaaaaaattctctgtggaagggctatgttagataaaattgaccgtaagctgctggccttactgcagcaggattgcaccctctctttgcaggcactggctgaagccgttaatctgacaaccaccccttgctggaagcgcctgaaacggctggaggacgacggtatccttatcggcaaagtcgccctgctggatccggaaaaaataggcctcggcctgaccgcttttgtgctgataaaaacgcaacatcacagcagcgaatggtattgccgctttgtcacggtggttaccgaaatgccagaagtgctggggttctggcgcatggctggtgaatacgattatctgatgcgcgtccaggttgccgacatgaaacgctacgacgagttttataagcgtctggtaaacagcgtgccggggctgagcgacgtcacttccagcttcgcgatggaacagattaaatacaccacttctttacccatcgaataaatatccagaatcaggtcaggacacaacgcgtgcgattatttgctcaattaagctggtatttccgtcgggaatggcgtcgctatctcggggctgtcgccttgcttgtcattatcgcgatgctgcaactggttccgccaaaagtggttggtattgttgtcgatggcgtgacagaacaacactttactaccgggcagatcctgatgtggatcgccaccatggtgctgattgccgttgtggtttatctcctgcgttacgtctggcgggtattgctgtttggtgcgtcttatcaactggctgttgaactgcgtgaagattattaccgtcagctaagccggcagcatcctgagttttacctgcgtcatcgcaccggtgacctcatggctcgtgcgaccaatgacgtcgatcgcgtcgtgtttgccgccggagaaggggtgctgacgctggtggatagtctggtgatgggctgcgctgtgttgattatgatgtctacgcaaattagctggcagttgaccttattttccctgttgccgatgccagtgatggcgatcatgattaagcgcaacggcgatgctttgcatgaacgctttaagctggcacaggcggcgttttccagtcttaatgaccgcacccaggaaagcctcaccagtatccgcatgatcaaagcctttggtctggaagatcgccagagcgcgttatttgccgcggatgccgaagataccggcaaaaaaaacatgcgggtggcgcgtattgatgctcgtttcgacccgaccatctatatcgcgattggtatggcgaacttgctggcgattggcggcggtagttggatggtggtgcagggcagtttaacgctgggccagctcaccagttttatgatgtatttaggtctgatgatttggccaatgctggcgctggcatggatgtttaacattgtggaacgtggtagtgctgcgtacagccgtattcgcgcgatgctggcggaagcgccggtggtgaacgatggtagcgaacccgtgccggaagggcgtggcgaactggatgtaaatattcaccagttcacgtatccgcagactgaccatcctgcgctggaaaacgtcaatttcgccctgaaacccggtcagatgctgggtatctgcgggccgactggttccggcaaaagtaccctgttgagcctcattcagcgtcatttcgacgtcagcgagggggatattcgctttcatgatattcctctgacgaagttacaactcgatagctggcgtagccgcctggcggtagttagccagacgccattccttttttctgacactgtggcgaataacatcgcgctgggttgcccgaatgccacccagcaagagattgagcatgtcgcgcggttagccagcgtacatgacgatattttgcgtctaccgcaaggttacgatacagaggtgggcgagcgcggtgtgatgctttccggcgggcaaaaacagcgtatctccattgctcgtgcgttattagtcaacgcggaaatcctcatccttgatgatgcgcttagcgcggtggacggacgcactgagcaccagatcctgcataacctgcgtcagtgggggcagggaagaacggtaatcatcagtgcccatcgcctttctgcactgacggaagccagtgaaattattgtgatgcagcacggacatatcgcccagcgtggcaatcatgatgtgctggcacaacaaagcggctggtatcgcgatatgtatcgctatcaacaactggaggcggcgctcgacgacgctccggaaaatcgcgaggaggccgtcgatgcgtaactaaaaatcgcgaggaggccgtcgatgcgtagttttagccaactgtggccgactctcaagcgcctgttagcgtacggtagcccgtggcgtaaaccgctggggattgcggtcctgatgatgtgggttgcggcggcggcagaagtcagtgggccgctgcttatcagctattttatcgacaatatggtagcgaaaaataacctgccgttgaaagtggttgcagggctggctgcggcgtatgttgggctgcaactgtttgccgccgggctacattacgcgcagagcctgctgtttaatcgggcggcagtaggcgtagtgcaacagttgcgtaccgacgtgatggatgctgcgttacgccagccattaagcgagtttgatacccaacccgtcgggcaggtgatttcccgcgtcactaatgacactgaagtgatccgcgatctctacgttaccgtagtggcaactgtcctgcgcagtgccgcgctggtgggcgcgatgctggtggcgatgttcagcctcgactggcgaatggcactggtggcgataatgattttcccggtggtgctggtggtaatggtgatataccagcgttacagcacgccgattgtccgtcgtgtgcgcgcctatttggcggatatcaacgacggctttaacgaaatcatcaatggcatgagcgttatccagcagtttcgtcagcaggcgcgatttggcgaacgtatgggggaggccagtcgtagtcactatatggcgaggatgcaaaccctgcgcctcgacggttttctgctgcgtccgctgctgagtctgtttagtagcctcattctttgtggcttgttgatgctgtttggcttctccgccagcggcaccattgaagtgggcgtgctgtatgcgtttatcagctatcttgggcgacttaacgaaccattaatcgaactgaccacgcaacaggcgatgctgcaacaggctgttgttgctggtgagcgcgtgtttgaactgatggacggaccgcgccagcaatatggcaatgatgatcgcccgttacagagtggcaccatcgaagtcgataacgtgagttttgcttatcgcgatgacaatctggtgctaaagaacattaatctctctgtgcctagccgcaattttgtggcgctggtcgggcataccggcagtggcaaaagcaccctcgccagtttattgatgggctattacccgctaacggaaggtgagattcgccttgatggtcgtccattaagtagcctaagtcacagcgcgctgcgccagggcgtggcaatggtgcagcaagatccggtggtgctggcggataccttcctcgccaacgtgacgctggggcgggatatctccgaagaacgcgtctggcaggcgctggaaaccgtgcaactggcggagctggcgcgtagcatgagcgacggtatttacacgccgctgggcgagcaggggaataatctcagtgttgggcaaaagcaactgctggcactggcgcgcgtgctggtcgagacgccgcaaatcctgatccttgatgaggcaaccgccagcattgactccggtactgaacaggcgattcaacatgctctggcggcggtgcgtgaacataccacgctggtagtgattgctcaccgcttaagcaccattgttgatgccgacaccattctggtgcttcatcgtgggcaagccgtggagcagggcactcaccagcaactgctggcggcccagggacgctactggcagatgtatcaactgcaacttgcgggcgaagagctggcagccagcgtgcgtgaagaggaaagtttgagcgcctgaatagcgcaatatttcatcgttggtgcaaaaatgtaacgcactgtgcactgtcatagtgcgttttcattttcaaacttcttaacttcctgctctctttctcgtttttcatttctggcacaccgcttgcaataccttcttcgtgtagcagaaccattaccgaattctgaccggaggggatctatgaagctggtgaccgtgataatcaaaccattcaagctggaagacgttcgtgaagcgttatcttccattggtattcagggcctgaccgtcaccgaagtgaaaggtttcgggcgtcagaaagggcatgccgagctgtaccggggggcggaatacagcgtcaatttcctgccaaaagtaaaaattgatgtggcgattgctgatgaccaactcgatgaagtgatcgatatcgtcagtaaggcggcttacaccggaaaaattggcgacggcaaaatcttcgtcgctgaattgcaacgcgtcattcgtattcgtaccggcgaagccgacgaagcggcgctgtaatctctggcacacagcaacaggaacgaaaaatgaagatagcgacgataaaaactgggcttgctagtctggcgatgcttccgggactggtaatggctgcacctgcggtggccgataaagccgacaatgcgtttatgatgatttgtactgcgctggtgctgtttatgactattccggggattgccctgttttacggtgggttgattcgcggcaaaaacgtgctgagcatgctgacgcaggtgacggtgacatttgcactggtctgtattctctgggtggtttacggttacagcctggcgtttggtgagggcaacaacttcttcggcaacattaactggttgatgctgaaaaacatcgaactgacggcggtgatgggcagcatttatcagtatatccacgtggcgtttcagggaagctttgcctgcattaccgtcggcttgatagttggggcgctggcggaacgaatccgcttcagtgctgtgttgattttcgtggtggtatggctgacgctctcttacattccgattgcgcatatggtgtggggcggtggtttgctggcttctcacggtgcgctggatttcgcgggtggcaccgtggtgcacattaacgccgcaatcgccggtctggtgggcgcgtatctgataggaaaacgcgtgggcttcggtaaagaggcgtttaaaccgcacaacctgccgatggtcttcaccgggactgccattctctatatcggttggtttggctttaacgccgggagtgcgggcacggcgaatgaaatcgcggcactggcatttgtgaatactgtggtcgcaacggcggcggcaattcttggctggatcttcggtgaatgggcgctgcgtggtaagcctagtctgctgggggcgtgttctggcgcgattgccggtctggtcggcgtgacgccagcctgcggctacattggggttggcggcgcgttgattatcggcgtggtagctggtctggcgggcttgtggggcgttaccatgctcaaacgcttgctgcgggtggatgatccctgcgatgtcttcggtgtgcacggcgtttgtggcattgtcggctgtatcatgaccgggatttttgccgccagcagcctgggcggcgtgggcttcgctgaaggtgtgacgatgggccatcagttgctggtacagctggaaagcatcgccattacgatcgtctggtccggtgttgtggcatttatcggctacaaattggcggatctgacggttggtctgcgtgtaccggaagagcaggagcgagaagggctggatgtcaacagccacggcgagaatgcctataacgcgtaacaagcactgcaaaaaacagccggacggttttcacctccggctatttttttaattgtgattacgcatcaccccttcctgaacggtgctggcaaccagtacgccgtcttgggtataaaactcaccgcgcacaaagccacgtgcgctggacgcgctggtgctctccacgctatacagcagccattcattcaaattaaacgggcgatggaaccacatggaatggtcaatggtggcaatctgaatccccggttcgagaaaaccgatgccgtgcggctgtagagctaccggcaggaagttaagatcagaagcgtaaccgagcagatactgatgaacgcgcaggtcatccggcacgctaccatttgcgcggatccacacctgacgatgtggttctgcgacgtgacctttcagtgggttatgaaactccaccggacggacttccagcggacgatcgcagatgaatttatctttcagcactggcggcagcaggtgcgccaggctttgggcgatttgcgtttcgctagggaggccatcaggcgctggcgcggacggcattgttttttgatgttcgaaacccgcttctggtgcctggaaagaggcagtcatataaaaaatcggtttgccgttttgaatagcagcaacccggcgggcgctgaagctgttaccgtcacgcagcgtttcgacatcataaataatcggcttcttactatcgccagggcgaagaaagtagctgtgaaagctatgtaccagccgctcttcagggacggtctcttttgcagcatacaaggcctgacccacgacctggccgccaaacacctggcgtaaacctaaatcttcactctggccgcgaaagagtccttcctcaattttttccagatttaacaatgtcagtaaattttttagcgcctgactcatataactctccagtaacaaagctgccgcagcaagccaaagtgagttgagtataacgcaaatttgctactggtccgatgggtgcaatggtctgaattacgggctaattacaggcagaaatgcgtgatgtgtgccacacttgttgacgttactattttgttaaccactcttccggcgaggaaagttagcccgctggtgcattgataataaggagaaatgaatgaaactcgtgcacatggccagtggtttagcggttgcgattgcgttggcggcttgcgcagataaaagcgcggatattcagacgccagcaccggctgcaaatacgtctattagtgcaacacaacaaccagctatccagcaaccgaatgtctccggtaccgtctggatccgtcagaaagtcgcactgccgcctgatgctgtgctgaccgtgacactttctgacgcgagcttagccgatgcaccgagtaaagtgctggcgcagaaagcggtgcgtactgaaggtaaacagagtccattcagctttgttctgagttttaacccggcagatgttcagccgaacgcgcgtattctgttgagtgcggcgattaccgtgaatgacaaactggtatttatcaccgataccgttcagccggtgatcaaccagggcggaactaaagccgacctgacattggtgccggtacagcaaaccgccgtgccggttcaggccagcggtggcgcaacgactaccgtacctagcactagtccaactcaggtgaatccgtctagcgcagttccagctcctacgcaatattaagcgacgttaaccctctccgcccggagagggttagtagttccagcgataacgctgcaagtcgatttgcccgcttccgcttaccatcacaccttctgccagtaatgcctgtcgctgacgctgtaaatccggtccggttaggctaattgtgccgtggcgattaaccacccggtgccagggtaaggtgctgccttcagggagacgctttaacacaccgcccacctggcgcgcggcgcgggggcttcccgccagtttcgccacatcaccgtaagtggtgacatagccttcgggaatagcggcgacgatttgccagacgcgttggggaaaactatcttctttttccatcttttcttcctgaggtaatttttcagcataatctggaaaaacgccgctgtgaagtcgcattgcgcaagaaaccagcatctggcacgcgatgggttgcaattagccggggcagcagtgataatgcgcctgcgcgttggttctcaacgctctcaatgggggctctgttggttctcccgcaacgctactctgtttaccaggtcaggtccggaaggaagcagccaaggcagatgacgcgtgtgccgggatgtagctggcagggcccccacccatttctgcctcccaccgtttcgtcaaaaaatcccaacatggctaaactttaaccacaactgacgtcgcaagaattgtctggctgcgcagtacgcttcggaggtatgtctgatgaagtatgttgatggttttgtggttgccgttcctgccgataaaaaggatgcctatcgggaaatggccgctaaggctgcgccattgtttaaagagtttggcgcgcttcgtattgtcgaatgctgggccagcgatgtaccggatggcaaagtgaccgattttcgtatggcggtgaaagcggaagagaatgaagaggttgtctttagctggattgaataccctagtaaagaggtccgcgacgctgctaatcaaaagatgatgagcgacccacggatgaaagagttcggcgagtccatgccgtttgacggcaagcgaatgatctatggcggattcgagagtatcatcgacgaataagtagcgtgacgggctgtgcggcgtgccgtcagcccaaaaattcacaaatgttgctcggcccagcgtaagaaatcttctttcggtaatgccttgctgtagagccagccctgaccgtagtgcacgccatgctggcgtaaccactcttcttgtttactggtttcgattccctccgctaccattttcagtttcagtgtttttgccatttcgatgatatgcggcgtgacatttttatattccagcgcatcaacgaaagatttatcgatcttcagaatgtcgacatccagatcctgtaaataacttaaactactataccccgtaccaaaatcatcaagataaatttcatggcccgcctcccggtagcgagaaattatcggggcgctggttttcggatcggcaaactcgcgttcagtgagttcaagcgcgatctgtctgggattaacctgatagtgattgatcatgtcacgcagcaattgcgggattttttcgctggtgagcacgggggattcaagattgatgctaatatgctgctgtggatgctgacgcagccagtcgcccatatcttcaaagacgcttcttataatcagtagcgtcaatggctcagaaaggcccgtttgctgtgccagcggaataaaactatctggactcaaccaactaccgtctgtctgcggccagcgcgccagtgcctcagcaccgacaattttgccattggctaaggagacaatcggctgatagtgcacgcaaatatcacgattttcgatagcatcctgcagccgatgatgcggactctgaatacggcgcaaaatacgcagcacaaacatcgctgccagcaggccaatcaccaacccgagcggtaaccaaataaagacttgccgatgccagcctttctgcaacattttcgtactagcccatgtgatgatgctaatattcatctccggtaagggcaggatatcgtaaatgattccattattttcgatatgctcaccgggtgttttttgtagcctggtaataattccctgagcaatttcatcgctgctggttatgacaacgttatgggcattgccaataatggcggcatcaatttgccaactgctatagggaatgacatcaataaaggaagcggggtcgatcatgacgacataatgtgccgttcccatggcgaccatgtaacggataatgcctaaatcgttatggcttgttaaccagacacgataaccatctttgctaattttacctggctcggggaaggtatcgggcggactttcatgctccagagagctacactggggaacgttgttatcgatataagccacttcctgaatatagcgataactgtaagatacccgacgcatttccatgagatgggcttcgctacaggcagcgccttgccatctttccagctcctgcagcgcatctttcccttgtgtcgccaccttattggctcgaatagcgacgcgggaggaataggtatccagctcttcaataaagcttgtttctacctgctgatgggccagccagatgcttaagccgacaggcagcaatacactaagaatcagtactccgctaataaggccgaccagatgtcgtgttctcaccagcatatccttattaacacagtgtagggaaagtatatctgattgtggaaaaaggctggctggagataaggaggtagagctggtatttcatgaagtgatgggtggaaacgatcattgtcatttgaccaggcgcagagctttacgcctggtatgtaaccctaacttaagatgtactttcggcgcgagcgagggtaaaaatatcgtaaaaagacagttcacctttacggacgatcattttttgcagttgttccttatgaacatccgcgacacgcggagagttcaagatggcttcaaccagcgcggcaggtacaaagcgcgtgttgtaccattcgccgttatagcaaacgcggaaatccagcacgtcgatatcttcatagcggtagcgtgggtagacatcgaaaaagaagaaaccattaagcaggataaataatacaaccagtagccagacagagccactcagcgtttcggactgcaacatcaccgccagggtggcaaaaaaagcaacgtacataccgataaacagccccggatgtttacggataaaactgatactaaagcggggtttgttgtcgcgtttttcgcgggtattcagagactcaatcgtttcggtcagcaggcgttgtatttcggtcatcgtttgccttcgtggtatctgcaactttccagggaacaccctattttaacgtgggaatagtagaggggaagtaacagatctaccacaattttgcataacagttgcgaaaaaccgattacaattttttaattattctggctggattaccgcccacgacaacgttgtccgggacatcttttgtgacaactgcaccactggctaccacgacgttatcaccaatggtcacaccagggttaatgaccgcgcgtccgccaatccagacgttattaccgatggtgacgggtttccccagttcagcaccgctattacgtgctacagggtcgatgggatgtgttgccgtgtagatatgaacgcctggtgccaacatacagttatcaccgatgcgaatagggcagacatcaagcatcacgcaatcgaagttggcgaaaaaattattaccgagaaaaatgttatagccatagtcacagcgaaacgttggctcaatataagcctctgtcacctgaccgaatagatcagcgagaatttgctggcgtaatgtgtgctcttccgccagggaatgattgtatcggtgaataagctgacgagcgcgcaggcgatcgcgagataacgtctcatctgcgctgcgatacaactcaccagcaatcatcttttctttttctgtgctcattactgacctccggttgctgaaaatgcggcaacacagtaagacgaaaagtcagtgaagagaacgttcccattacatctgtgtgataaagatcacatagggtatgtcttcatggcgaaaaagtataaaattcttaataaacagccggttatagctccgaaagcgaattatttattagcgaataaatttccatacactggaagggatcttgtcgtacagtttattcatggtcaattcggcgaggcggtgatctgcggcactgtaaaataccgccagttcattatcacttaattcgtatttatttttctcgataacacgctccagcgtgtcaattgtctggcaacgacgtaaacgcattaaataatcggttttcgttaaaggtttttcggacatacttctacctatggttgtaataattttaacaagataaactcgcaggattctctttcgtcgcattgacaaaacaacggaatagtcgattaccactcttccgccatttctgaagatcctgcatattaataccataactactgaacaacataaaggtgtcatccagatattcgtcgatctgctcaatgagcttattgtcttcattatacttaattttgtaattaagtgcgaaggtcgcaatatgctcaatcagttcattcaactggaggttgatcgcgctggttgggtcgtttacccagccatgattgctttcttcaaggtttgcaaggcagtcatgatacagggtttcacagagaaacttaagctgtgcgatatcatgtcttttgggactgtattcatccataacgcgtccccttcttagcggttgaactaacggacacctttcgggatggaaaaaacttactgacctggacttgccctctcgtttgttagcttaactataagccactctttgcaggttttcatcgcattattacgaaaaattacaattaggaaggaagcgggacaggactcactttttcatactagcactaacccgcagcaggtaaaagcagtttgctcgaactattcataacatttcaggattatcgccagatgaaattggtgacactaataccaggattgctctgaatatgacgtaataaccgaggaatgaataaagaattaccgcaaataattaagaatagcctctaaatgattatggattattaaatctattagcgctacttaatataaattaactaacaatcagtattttttatgaattttatccgtggttaatactggttttcgtatgagatcctgagttggtggttcaattactccttaatgttcgtaggttatgcataaaaaaggccgcttacgcggccttagtgattacacgttgtatcaatgatgatcgacagtatggctgtgctcgatatcttcattcttgcggctaaagcggcggcgaaccaccacaaagaataccggaacgaagaagattgccagtaccgttgcggtcaccatcccgcccattacaccggtacctactgcgttctgcgcgccggaaccagcaccagtactgataaccagcggcataacgccgaggataaacgccaggctggtcatcaggatcggacgtaaacgcatccgcaccgcatcaagcgtcgcttcaatcagacctttaccttctttatccatcaagtctttggcgaattcgacgataaggatcgcgttcttcgcgctcaacccaatggttgtgagcaggcctacctggaagtaaacgtcattggtcaggccacggaaggtggcagccagcaacgcaccgataacccccagcggaacgaccagcataacggagaacggaatgctccagctctcgtacagcgccgccagacacaggaacacgacaatcaagctaatcgcgtacagactaggtgcctggttgccggagagacgttcctgataggacatccccgtccagtcatagccaacaccggtaggcagtttgctcgccagttgttccatcagctccattgcttcaccggtacttttacccggtgccgcctggcctaagatttccatggatggcaggccgttgtaacgttccagacgcgggctaccgtactcccaacgagaagaggagaacgcgctgaatggcaccatctgaccatcagcagcacgaacataccagtcgccgatatcatccggcagcatacggtatttcgcttcactcatgacataaactttcttcacacgaccgcggtcgataaagtcgttcacatagctgccgccccatgcagcgcccagagtggtgttaatgtcgttgatagaaacacccagcgcctgcgctttttcctggtcgatatcaatcttaaactgcggggtatcttccagaccgtttggacgtacgctggtcaacatatcagggtgcttcgctgcttctgcaagcaactggttacgcgcctgagtcagtttttcgtgaccaaggccagcctggtcaatcagctcaaagtcaaagccggttgcagtacccagttccacgattgcgggcaggttaaaggcgaaaaccatcgcatctttgatttggctgaaagcgcgtgttgcacgcatggtaatcgcttcaactttgttttcttcgcccggacgatcggcccagtccttcaaggaaacgaacgcaataccggtattctgaccacgtcccgcaaagccgaagccgttaacggcgaacacgctctcaacgttgttcttttctttggtcagatagtaatgcgttacctcattgagcactttctgtgtacgttcctgcgttgcacctgctggcagctgaaccatggtcataaacacgccctggtcctcatctggcaagaaggagcttggcagacgcacgaacagataggccatgccgaccacgatgatcagatacagcaccaggtaacgccccgtactgcgcagaataccgcctacgctgtcggtgtagtggtgcgtgctcttctcgaacatgcggttaaaccagccgaagaagccttttttaccttccccgtgatcgcctttggcaatcggtttcagcatggtggcacaaagagctggagtcaggatcaacgccaccagtacgctcagcgccattgcactaacaatggtaatagagaactgacgatagatagcaccagtagaaccgccaaagaaggccatcggtacgaataccgcgctcagtaccatcgcgataccgaccagagcgccctgaatctgccccatgctcttacgggtagcttcttttggcggcaaaccttcttccgccataacacgctcaacgttttctaccacaacgatggcgtcatccaccaacaggccgatggcgagcaccatcccgaacattgttagcgtgtttatgctgaagccaaaggcggcaaggacggcaaaggtcccgagcaataccaccggtacggcaatggtcggaatcaacgtcgcgcggaagttctgcaggaacagatacataaccaggaacacgaggatgatcgcttcgaccagcgttttaaccacttcgtgaatagagattttcacgaacggcgtggtgtcgtatgggtaaacaattttcagaccgctcgggaagaacggttccatcttcgccagttcagcacggattgccgcagcggtatccagcgcgtttgcaccggtcgccagcttgatccccagaccggaagccggttggccgttaaactctgcgatgatgtcgtagttctcaccacccagctcaatcttcgcgacgtcacgcagcagcacgcgggaaccatcctgattcactttcagcaggattttgccgaactcttcagtagaggtcagacgcgtctgagcaataatagaggcgttaagctgttggcctttcaccggcggcgtaccaccgagctgacccgccgcaacctgggcgttctgcgctttgatggcggtaatgacatcaaccggcgttagctggaatttgttcagctcattcgggttcatccagatacgcatcgcgtactgactaccgaacaactgaacatcacccacgccgctcgtacggctgatggcatctttcatattcgccgccacgtagtcggagatatcctcctgcgtcatggtgccatcggtgttgataacgccgacaaccatcaggaagctgctggaacttttctcaacgctcaccccttgctgctgaacttcttgcggcagcaacggcatcgccagctgcagtttgttctgcacctgaacctgcgcgatatccgcatcagtaccagactcaaaggtcagggtgatctgcacggtacccgtggagtcactgttagaggacatgtacatcaggttatcgataccgttcatattctgttcgataacctgtgtcaccgtgtcctgcactgttttcgcatcagcgccggggtaggaggcggagatcgttactgccggcggtgcaatcgtaggatgttgcgccaccggcagtttgaggatcgccagcccccctgccaacatgatgataatggcgatcacccacgcaaaaatcgggcgatcgataaagaaattaggcatgtcttaacggctcctgtttaagttaagacttggactgttcaggctgagcaccgcttgcggcttgctggttattatcagcggtaacttcttgtgcttttacctggacaccaggacgcactttctgcagcccacttattactacgcgatcgcctgctttcagaccttctgtcaccagccacttatcgccaatagcctggcttgcaacgatcggacgggtttccactttgtcatccgcgccaactaccagtacggtggcatcgccacgcggcgtacgggttacgccctgttgcgggactaaaatagcgtttggattaagcccttcttccagacgtgcgcgcacgaacatacccggcagcagagtgtgatccgggttcgggaagatagcgcgtagggtgatagacccagtggtctgatcaacggtaacgtcagagaattccagcgtaccgtcctgcgggaacttaatgccgtcactggtgatcagactcactttggctttgccgttctcttgtttcagcgtgccattcgccagttcctgtttcaggcgcaggaagtcgttgctggactgggtcacatcaacgtagatcggatcaagttgctgcacggttgccagcgcagtcgcctgaccgttctgtaccaatgcgccttccgtcacgttgctcttaccaatgcgaccgctaatcggagaggtgactttggtgtaagccagattgatccgcgcagtttcaacggcagctttcgccgcagttaccgcagcattcgcctgttgcgcatcagccagagcctgatcgtactcttgcttactgatgtactgagtaccgagcagtttctgataacgattcaccgtcaattgcgcgatattggctgcagcctgggctttcgccagatcacctttcgcactgtcgtatgtcgcctgataggtcgcaggatcaatctgatagagagagacacctgcttcgatgtcgctaccttctttgaaattacgcttcaggataatcccgctaacttgaggacgaacttctgcgatccggtaggcactggtgcgacccggaagctcggttgtgatctgcagaggttcagttttgactgttactacgccaacggcgggcatctgctggccaccttgttgggcctgtttgtcgtcacatcctgttagggctaagctgccactgagcatcagaacgaccgccagaggcgtaaaccctctgtttttgttcatatgtaaacctcgagtgtccgatttcaaattggtcaatggtcaaaagttaataaacccattgctgcgtttatattatcgtcgtgctatggtacatacattcacaaatgtatgtaaatctaacgcctgtaaattcacgaacatatggcacgaaaaaccaaacaagaagcgcaagaaacgcgccaacacatcctcgatgtggctctacgtcttttcagtcagcagggggtaagttccaccagcctgggcgagattgcaaaagcagctggcgttacgcgcggtgcaatctactggcattttaaagacaagagcgatttgttcagtgagatctgggaactgagtgaatccaatattggtgaactagagcttgagtatcaggcaaaattccctggcgatccactcagtgtattaagagagatattaattcatgttcttgaatccacggtgacagaagaacggcgtcgattattgatggagattatattccacaaatgcgaatttgtcggagaaatggctgttgtgcaacaggcacaacgtaatctctgtctggaaagttatgaccgtatagaacaaacgttaaaacattgtattgaagcgaaaatgttgcctgcggatttaatgacgcgtcgcgcagcaattattatgcgcggctatatttccggcctgatggaaaactggctctttgccccgcaatcttttgatcttaaaaaagaagcccgcgattacgttgccatcttactggagatgtatctcctgtgccccacgcttcgtaatcctgccactaacgaataaccctgaatctgactccaggatttttcctggacattttcgtcgttgctattctggttcactgcgtcgtgatattcttgcggtttgactttttcaggtcgttcttcaggttcagaaaccttcattcatcatgactatgttccagtattacaaacgaagtcggcattttgtttttagtgcatttattgcttttgtttttgtcttgttatgccagaacacggcgtttgcgcgggcgagtagcaatggtgatctgccgacaaaagcggacctgcaggcgcaacttgacagtctaaataaacaaaaagatctttctgctcaggacaaactggtgcagcaggatctgacagatacattagccaccctcgataaaatcgatcgcataaaagaagagacagttcagctacggcaaaaagtcgctgaagcgccggaaaaaatgcgccaggcgaccgcggcgttaacagcacttagcgatgtcgataacgacgaagaaacgcgcaaaattctgagcacgctgagcttgcgccagctggaaactcgcgttgcccaggcgctggacgatttgcaaaacgcacaaaacgatctggcgtcttataacagccagctggttagcttacagacgcagcccgaacgcgtgcaaaatgcgatgtataacgctagccagcagctgcaacaaattcgcagtcgtctggatgggactgatgtcggcgagacagccttacgtcccagccagaaagtgttaatgcaggcccagcaggcgttgctgaatgcggagattgaccagcagcgtaaaagcctggaagggaacaccgtcttgcaggataccttgcaaaagcaacgtgattacgtgacggcgaacagcgctcgtctggagcaccagttacaactgttgcaagaagcggtaaacagcaagcgcctgactttaaccgaaaaaacggcgcaggaagccgtctccccggatgaagccgcgcgtattcaggctaatccgctggtgaagcaggaactggaaattaaccagcagttaagtcagcgtctgattaccgcgactgaaaacggtaatcagttgatgcagcaaaacattaaagtcaaaaactggctggagcgggcgctgcaaagcgaacgcaatattaaagagcagattgccgtcctgaagggcagcctgctgttgtctcgtatcctttaccagcaacaacaaacgctgcccagcgcggatgaactggaaaacatgaccaaccgcatcgcggatttgcgtctcgaacagtttgaagttaaccagcagcgtgatgcactcttccagagcgatgcgttcgtcaacaaactggaagaaggtcacaccaacgaagtcaacagcgaagttcacgatgcgttattgcaagtggttgatatgcgtcgcgaattgctggatcaactcaacaaacagttgggtaaccagctgatgatggccattaacctgcaaatcaaccagcagcagttaatgagtgtgagcaaaaacctgaaatccatcctgactcagcaaatcttttgggtgaacagtaaccgtccaatggactgggactggatcaaagcgttcccgcaaagcctgaaagatgaatttaagagcatgaaaatcacggtgaactggcaaaaagcctggcccgccgtttttatcgctttcctcgctggtttgccgctgctgttgattgccgggctgatccactggcgtctgggctggctgaaagcgtatcaacaaaaactggcttccgctgtgggttccctgcgtaacgacagccagctcaacacaccaaaagcgatccttatcgacctgatccgtgcgctgccggtgtgcctgattattctcgcggttggcctgattctgttgaccatgcagctcaacatcagcgaactgctatggagcttcagcaaaaaactggcgatattctggctggtgtttggcctgtgctggaaggtactggagaaaaacggcgttgccgtacgtcacttcggcatgccggaacagcagaccagccactggcgtcggcaaattgtccgcatcagtctcgcattgctgcctatccatttctggtctgtggtggcagaactttccccgctgcatctgatggatgatgtgctggggcaagcgatgattttcttcaacctgctgctgattgccttcctggtatggccgatgtgccgcgaaagctggcgtgataaagagagccacaccatgcgactggtcaccattaccgtgctgagcataatcccgattgcgctgatggtgctgactgctacaggctacttctacactacgctgcgtctggcaggacgctggattgaaaccgtttatctggtgatcatctggaacctgctgtaccagacggtactgcgtggcttaagcgtagcggcgcggcgtatcgcctggcgtcgtgcgctggcgcgtcggcagaatctggtgaaagagggcgcagaaggtgctgaaccgccggaagaacccaccattgcactggagcaagttaaccagcagacgctgcgtattaccatgttgctgatgtttgcgctgttcggtgtcatgttctgggcaatttggtccgatttgatcaccgtgttcagctatctcgacagcatcacgctctggcattacaacggcactgaagctggcgctgcggtggtgaaaaacgtcaccatgggcagtctgttgtttgcgattatcgccagtatggtggcctgggcgttgattcgcaacctgcctggtttactggaagtgctggtgctcagccgactgaatatgcgccagggcgcgagctatgccattactaccatccttaactacatcattattgctgttggtgcgatgacggtgttcggaagcctgggcgtctcttgggataaactccagtggctggccgcagcattatccgtaggtcttggttttggtttacaagaaattttcggtaacttcgtctccggtttgatcattctattcgaacgtccggtgcgtattggcgatacggtaaccattggtagcttcagcgggacggtaagtaagatccgtattcgtgcgacaacgattaccgatttcgatcgcaaagaagtgatcatcccgaacaaagcgtttgttaccgagcgtctgatcaactggagcttgactgacactactacgcgtctggtgatccgtctcggcgtggcctatggctccgatctggaaaaagtgcgtaaagtgttactgaaggcggcgactgagcacccaagggtgatgcacgaaccaatgccggaagtcttctttacggcatttggtgccagcacgttggatcatgagctgcgtctgtatgtgcgtgaactgcgtgaccgtagtcgtactgtcgatgagctgaaccgtactatcgatcagctgtgccgtgaaaacgacatcaacattgcctttaaccagcttgaagtgcatctgcacaacgagaagggcgatgaggtgacggaagtaaaacgcgactacaaaggcgatgacccgacgccagcggtagggtaaaaacgaaagggggcaacatttagttgccccgagattgctaacaaagtgcgcgttgttcatgccggatgcggcgtgaccgccttatccggcctacgaaaccgcaagaattcaatatattgcaggagcggtgtaggcctgataagcgtagcgcatcaggcagttttgcgtttgcccgcaaccttaggggacatttagcgaccccatttatttctcacttttccgcctcatcatcgcgcgttaatttcttttcataatcacgctttacaatatccagcgcgcgcagcacggtactggcagggatctgattttcctccagcagcacaatcaaatcgacagccagtttgacatcgtcaggggcattttccagactcatattctctccattgttagcgggttaaacgcgctaacctgttttcgattttttccagcgcatggcggcagcgtgccaggcgcgcttcataggcttccacttcacgatgcagcgtttgctgttccacgagatcggtcacccgcgccagacgggctctgcgttcggcaaccatctcacgtagccgccgctcaaaatcctgatgctgaatacgtttacgctgccagcgggcaattttcggtggtgcactgtcccactcgcgcaaactccaggcggaggcttcacgcgcgatggcttccagttgtgccgccagatgttccgccagccaggccacttgcggcagctgttgctgctcaactgcatgacgaagcgcagccagattatcgcccgcctcgtcgagacaagcctgtagtgttgtcgcacgagtctgaaaaagatgcctgtcgaaacgagcacttagcgtggcgaactgactcaccggggcacaacgctgacgcagcgtagcgagctgtccttccagtttttccagcagcagggcggttttcacgataagacctcaatgaaaatgataattgttatgctaaagtagccactctgtaagctgacaacactcaatatgcaacgaatcattttaatcatcattggctggctggcggtagtgctgggtacgctgggcgtggtattaccggtattaccgacgacgccgtttatcctgctggcggcctggtgctttgcccgttcttccccgcgctttcacgcctggttgctgtaccgcagttggtttggcagctatctacgtttctggcagaaacatcatgcgatgccgcgcggcgtcaaaccgcgggcgattttgcttattttgctcacgtttgccatttctctgtggttcgtccagatgccatgggtgcgcatcatgttgctggtaattctcgcctgtttgcttttctatatgtggcgaattccggtgattgatgaaaagcaagaaaagcactgaagcacaacaatcgcagttgcaattattgcgtacagccagtacattctggcgttttcgagcacaggcgcaggcggtcaaaggttaaacaactgttacttttgatacgtttaaaacgcgccgtgagtaccaccgtaacaagcaggcatacacttatgaccgcgactgcacagcagcttgagtatctcaaaaatagcatcaaaagcattcaggactacccaaaacccggcattcttttccgcgatgtcaccagcttactggaagacccgaaagcttacgctctcagcatcgacttgctggttgagcgttacaaaaatgcgggcattaccaaagttgtcggcaccgaagcgcgtggcttcttgtttggcgctccggtagctctgggtctgggcgttggctttgtaccggtccgtaaaccgggcaaactgccgcgtgaaaccatcagtgaaacttacgacctggaatacggcaccgatcagctggagatccacgttgatgccatcaaaccgggcgacaaagttctggtggtggacgacctgctggcaaccggcggcactatcgaagcgaccgttaaactgatccgtcgtctgggtggtgaagtggctgacgctgcgttcattatcaacctgttcgatctcggcggcgaacagcgtctcgaaaaacagggcattaccagctacagccttgtcccgttcccgggccattaattatcgccagtcttgtgctgcccacgctacggacagcacaagatgtgcattcagcctcgccgttctgacggggctgtgttagcattaccccttcgtgaatccaccttccagcgtttcagagcctgccaatgagttatcaggtcttagcccgaaaatggcgcccacaaacctttgctgacgtcgtcggccaggaacatgtgctgaccgcactggcgaacggcttgagcttggggcgtattcatcatgcttatcttttttccggcacccgtggcgtcggaaaaacctctatcgcccgactgctggcgaaggggctaaactgcgaaaccggcattaccgcgacgccgtgcggcgtgtgcgataactgtcgtgaaatcgagcaggggcgctttgtcgatctgattgaaatcgacgccgccagccgcaccaaagttgaagatacccgcgacctgctggataacgtccagtacgctccggcgcgtggtcgtttcaaagtttatctgatcgacgaagtgcatatgctgagccgccacagctttaacgcactgttaaaaacccttgaagagccgccggagcacgttaagtttctgctggcgacgaccgatccacagaaattgccggtgacgattttgagtcgctgtctgcaatttcatctcaaggcgctggatgtcgagcaaattcgccatcagcttgagcacatcctcaacgaagaacatatcgctcacgagccgcgggcgctgcaattgctggcacgcgccgctgaaggcagcctgcgagatgccttaagtctgaccgaccaggcgattgccagcggtgacggccaggttagtacccaggcggtcagtgcgatgctgggtacgcttgacgacgatcaggcgctgagcctggttgaagcgatggtcgaggccaacggcgagcgcgtaatggcgctgattaatgaagccgctgcccgtggtatcgagtgggaagcgttgctggtggaaatgctcggcctgttgcatcgtattgcgatggtacaacttagccctgctgcacttggcaacgacatggccgccatcgagctgcggatgcgtgaactggcgcgcaccataccgccgacggatattcagctttactatcagacgctgttgattggtcgcaaagaattaccgtatgcgccggaccgtcgcatgggcgttgagatgacgctgctgcgcgcgctggcattccatccgcgtatgccgctgcctgagccagaagtgccacgacagtcctttgcacccgtcgcgccaacggcagtaatgacgccaacccaggtgccgccgcaaccgcaaagtgcgccgcagcaggcaccgactgtaccgctcccggaaaccaccagccaggtgctggcggcgcgccagcagttgcagcgcgtgcagggagcaaccaaagcaaaaaagagtgaaccggcagccgctacccgcgcgcggccggtgaataacgctgcgctggaaagactggctagcgtcaccgatcgcgttcaggcgcgtccggtgccaagcgcgctggaaaaagcgccagccaaaaaagaagcgtatcgctggaaggcgaccactccggtgatgcagcaaaaagaagtggtcgccacgccgaaggcgctgaaaaaagcgctggaacatgaaaaaacgccggaactggcggcgaagctagcggcagaagccattgagcgcgacccgtgggcggcacaggtgagccaacttagcctaccaaaactggtcgaacaggtggcgttaaatgcctggaaagaggagagcgacaacgcagtatgtctgcatttgcgctcctctcagcggcatttgaacaaccgcggtgcacagcaaaaactggctgaagcgttgagcatgttaaaaggtagtacggttgaactgactatcgttgaagatgataatcccgcggtgcgtacgccgctggagtggcgtcaggcgatatacgaagaaaaacttgcgcaggcgcgcgagtccattattgcggataataatattcagaccctgcgtcggttcttcgatgcggagctggatgaagaaagtatccgccccatttgatcgtaagcacagcttacgttcgtcatccttaacgtgattgagagagaaacctatgtttggtaaaggcggtctgggtaacctgatgaagcaagcccagcagatgcaagaaaaaatgcagaaaatgcaggaagagatcgcgcagctggaagtcaccggcgaatctggcgcaggtctggtaaaagtgaccatcaacggtgcacacaactgccgtcgcgtagagatcgacccgagcctgctggaagacgacaaagagatgctggaagacctggtggctgcagcattcaacgacgcagcacgtcgtattgaagaaacgcagaaagaaaaaatggcctctgtatcctccggaatgcagctgccgcctggctttaagatgccgttctgatgcaaaccagcccgctgttaacacagcttatggaagcactgcgctgtctgccgggcgttggcccgaagagcgcgcagcgtatggcgttcacgctgcttcagcgcgatcgtagcggcgggatgcgtctggcgcaggcgctcacccgggcgatgagcgaaatcggccactgcgccgattgccgcactttcaccgaacaggaagtctgtaacatctgtagcaatccgcgtcgtcaggaaaacggtcaaatctgcgtggtggagagtccggcggacatctacgccattgagcagacggggcagtttagtggtcgttattttgtgttgatggggcatctgagtccgctggacggcatcggtccggatgatatcgggcttgatcgtctggaacagcgtctggcagaggaaaaaatcactgaagtgatcctcgccaccaaccccacggttgaaggtgaagctaccgctaactacattgccgagctttgcgcgcaatatgacgtggaagccagccgaatcgctcatggcgttccggttggcggcgagctggaaatggtcgacggcaccacgttgagtcactcccttgccgggcgtcataagattcgtttttaagcaaacgagagcaggatcacctgctctcgcttgaaattattctcccttgtccccatctctcccacatcctgtttttaaccttaaaatggcattattgaggtagacctacatgaaaggacaagaaactcgtggttttcagagtgaagtgaaacagcttctgcacctgatgatccattctctctattccaataaagaaatcttcctgcgtgagcttatctctaacgcctccgatgcggcggacaagctgcgtttccgtgcgctctctaacccggacctgtacgaaggtgatggcgaactacgcgttcgtgtctctttcgataaagacaagcgtacgctgaccatctccgataacggcgtggggatgacccgcgacgaagtgattgaccatctggggactatcgctaaatccggtaccaaaagtttcctcgaatccctgggttctgaccaggcgaaagacagccagctgatcggtcagtttggtgttggtttctactctgcgtttatcgtggccgacaaagtgaccgtgcgtactcgcgcggcaggcgaaaaaccagaaaatggcgtcttctgggaaagcgctggcgaaggtgaatacaccgttgccgacatcaccaaagaagatcgtggtactgaaatcaccctgcatctgcgtgaaggcgaagacgagttcctcgatgactggcgcgtgcgttccatcatcagcaaatactccgaccatatcgcgctgccggtagagatcgaaaaacgcgaagagaaagacggcgaaaccgttatctcctgggagaaaatcaacaaagcgcaggcgctgtggactcgtaacaagagcgaaatcaccgatgaagagtacaaagagttctacaaacacatcgcccacgactttaatgatccgctgacctggagccacaaccgtgttgaaggtaagcaggagtacaccagcctgctgtacatcccgtcccaggctccgtgggatatgtggaaccgcgatcataaacacggcctgaaactgtatgttcagcgtgtgttcatcatggacgacgcagaacagttcatgccgaactatctgcgcttcgtgcgtggtctgattgactccagcgatctgccgctgaacgtttcccgtgaaatcctccaggacagcacggtaacgcgtaacctgcgcaatgcgctgaccaagcgtgtgctgcaaatgctggaaaaactggcgaaagacgacgcggaaaaataccagaccttctggcaacagtttggcctggtactgaaagaaggtccggcggaagatttcgctaaccaggaagcgatcgccaaactgctgcgttttgcttctacccataccgattcttctgcgcagaccgtatctctggaagactacgtttcccgcatgaaagaagggcaggagaaaatctactacatcaccgcagacagctatgcggcagcgaagagcagcccgcacctggaactgctgcgtaagaaaggcatcgaagttctgctgctttccgaccgcatcgatgagtggatgatgaactatctgactgagttcgacggtaaaccgttccagagcgtgtctaaagttgacgagagccttgaaaaactggctgacgaagttgatgagagcgcgaaagaagcggagaaagcactgactccgttcatcgaccgtgtgaaagccctgctcggcgagcgcgtgaaagatgtccgtctgactcaccgtctgaccgatacgccagcgatcgttagcaccgacgcggacgaaatgagcactcagatggcgaaactgttcgctgcggcgggccagaaagtgccagaagtgaaatacatcttcgaactgaacccggatcacgtactggtgaaacgtgcggcagatactgaagatgaagcgaagttcagcgagtgggtagaactgctgctggatcaggcgctgctggcagaacgcggcacgctggaagatccgaacctgtttattcgtcgtatgaaccagctgctggtttcctgatgtaatgccggatgaccttcgtgtcatccggcatttttcttttcatcatctgcactttccgcaaattatctcgccattaaccgtttcagccccaggtgcctttcttgaggcaatcgcctgttggtggtatcgtttatcgctttttcaaaaaattcgacacattttaaggggattttcgcaatgcgtatcattctgcttggcgctccgggcgcggggaaagggactcaggctcagttcatcatggagaaatatggtattccgcaaatctccactggcgatatgctgcgtgctgcggtcaaatctggctccgagctgggtaaacaagcaaaagacattatggatgctggcaaactggtcaccgacgaactggtgatcgcgctggttaaagagcgcattgctcaggaagactgccgtaatggtttcctgttggacggcttcccgcgtaccattccgcaggcagacgcgatgaaagaagcgggcatcaatgttgattacgttctggaattcgacgtaccggacgaactgatcgttgaccgtatcgtcggtcgccgcgttcatgcgccgtctggtcgtgtttatcacgttaaattcaatccgccgaaagtagaaggcaaagacgacgttaccggtgaagaactgactacccgtaaagatgatcaggaagagaccgtacgtaaacgtctggttgaataccatcagatgacagcaccgctgatcggctactactccaaagaagcagaagcgggtaataccaaatacgcgaaagttgacggcaccaagccggttgctgaagttcgcgctgatctggaaaaaatcctcggctaattcgaaagcgcgcacggacagtcccctcgccccctcggggagagggttagggtgaggggaacaggcccgcacaagcaaacttatcagcaatctcaggccggatattcattcggccttttacaaaaacctcaatctgcgctattcctttttctgatttgacctctcacagcaattagttcttcttcctcacttttccgctacaattatcaacaagttgaatcgataagaggcggtaatgcgtcagactaaaaccggtatcctgctggcaaacctgggtacgcccgatgcccccacacctgaagcggtaaaacgctatctgaaacaatttttaagcgacagacgcgtggttgataccagtcggttgttatggtggccattgctgcgcggcgtgattttgccgctgcgcagcccgcgtgtggcgaagctgtatgcctctgtctggatggaaggtggcagcccgctgatggtttacagccgccagcaacagcaggcgctggcacaacgtttaccggagatgcccgtagcgctgggaatgagctacggcagcccaagtctggaaagcgccgtagatgaactcctggcagagcatgtagatcatattgtggtgctgccgctttatccgcaattctcctgttctacggtcggtgcggtatgggatgaactggcacgcattctggcgcgcaaacgtagcattccggggataagctttatacgtgattacgccgataaccacgattacattaatgcactggcgaacagcgtacgcgcttcttttgccaaacatggcgaaccggatctgctactgctctcttatcatggcattccccagcgttatgcagatgaaggcgatgattacccgcaacgttgccgcacaacgactcgtgaactggcttccgcattggggatggcaccggaaaaagtgatgatgacctttcagagccgctttggtcgggaaccctggctgatgccttataccgacgaaacgctgaaaatgctcggagaaaaaggcgtaggtcatattcaggtgatgtgcccgggctttgctgcggattgtctggagacgctggaagagattgccgagcaaaaccgtgaggtcttcctcggtgccggcgggaaaaaatatgaatatattccggcgcttaatgccacgccggaacatatcgaaatgatggctaatcttgttgccgcgtatcgttaaagctgagcggtaaagaactgagcgccgtcgcgaagagcctcgtcggcggttttcatcatccgactataatgcaaaaaggcgtgcagcgtgcctgggtagagtttgaactcacagggctgctgatgcgccgctaacgtctggtaaagcagacggctgtcatccagcagcggatcgaactccgccccggcaataaaacagggcggaacttcgcgagtgagatcattattaaacagacagtaatacgggctctcgcggtccgcgtcgttgcttaaatatgcctcttcgtacatctgcaaatcctgttgcgttaagccatcccagacaccgcccaacagacgacgagtcacggaatcccgtaatccgtaaagcccataccacagcaaaacgcccgcaactttaccgcaatcgatctgtttatcacgcaaccacaacgcactggcgagcgccagcatggcacctgcggaatcaccggcaaagccaatgcgggacatattgatttgataatcctccgcctgctggtggaaataacaacaagcagccacaatttcctctatcgcttgcggaaaacgcgcttcaggactaagggtgtaatcaataccaatcaccgtacattggctgtagcttgccagcaggcgcatgatgcgatcgtgggtatcgagattgccgagaataaaaccgcctccatgcaaataaaatagcgtcgctgggctatctggctgcggacaaaagagacgtgtttccacctgcccatattttgttggaaccatgtaagctctggttgccatttctggagcgcccgcattccagaatcggcgctcaagcgtgtaatactgtcgttgctcagcaatcgttcccgttgcgggccagggcggtaaatccggctgaagagtattcacaacggtcttcatttcagcagaaataaggtccagaacaggtagtttgttttccggcttcatacaaaaactcctttcaaattacgtcattgtaaggaaccactgccatgaaaatgcgatcccgcctgctgatattgaaactggctgcgtctcgcgcgctcccgtcagattgtgttaacattcgccgctcagttaaccacccgtaaaaacaaccatgaaatttcccggtaaacgtaaatccaaacattacttccccgtaaacgcacgcgatccgctgcttcagcaattccagccagaaaacgaaaccagcgctgcctgggtagtgggtatcgatcaaacgctggtcgatattgaagcgaaagtggatgatgaatttattgagcgttatggattaagcgccgggcatagtctggtgattgaggatgatgtagccgaagcgctttatcaggaactaaaacagaaaaacctgattacccatcagtttgcgggtggcaccattggtaacaccatgcacaactacagcgtgctcgcggacgaccgtagcgtgctgctgggcgtcatgtgcagcaatattgaaattggcagttatgcctatcgttacctgtgtaacacttccagccgtaccgatcttaactatctacaaggcgtggatggcccgattggtcgttgctttacgctgattggcgagtccggggaacgtacctttgctatcagtccaggccacatgaaccagctgcgggctgaaagcattccggaagatgtgattgccggagccagcgcactggttctcaccagttatctggtgcgttgcaagccgggtgaacccatgccggaagcaaccatgaaagccattgagtacgcgaagaaatataacgtaccggtggtgctgacgctgggcaccaagtttgtcattgccgagaatccgcagtggtggcagcaattcctcaaagatcacgtctctatccttgcgatgaacgaagatgaagccgaagcgttgaccggagaaagcgatccgttgttggcatctgacaaggcgctggactgggtagatctggtgctgtgcaccgccgggccaatcggcttgtatatggcgggctttaccgaagacgaagcgaaacgtaaaacccagcatccgctgctgccgggcgctatagcggaattcaaccagtatgagtttagccgcgccatgcgccacaaggattgccagaatccgctgcgtgtatatagccacattgcgccgtacatgggcgggccggaaaaaatcatgaacactaatggagcgggggatggcgcattggcagcgttgctgcatgacattaccgccaacagctaccatcgtagcaacgtaccaaactccagcaaacataaattcacctggttaacttatagtagcttagcgcaggtgtgtaaatatgctaaccgtgtgagctatcaggtactgaaccagcatagtcctcgtttaacgcgcggcttgccggagcgtgaagacagcctggaagagtcttactgggatcgttaagttatcgtcggttcgtaggccagataaggcgttcacgccgcatctggcatttggctctcgatgcctgatgcgacgctggcgcgtcttatcatgcctacatatttttcatattttacatccggcaaccaccgtttaccccgtcaccacctcacccgccggtggcgtttccagcagttccagcatggtacgggcgatttcacgctcgcccatcactacctgattcgcaccacgttcggtgatatacgccacttcatcgtcataatgggcgcgggcaataatctcaatatccggatttttcgcgcgggcagatgccacaatctcacccgcttcataaccgttgggaatcgtcaggatcagccattttgcacattccagatgcgccagttgcataatttcttcgttcgccgcattgcccaatactgcgcggaccccgcgctctcgcagctcatcaacacgggttcgactcgtctcaatcaccaccagcggaatatcagaggcgagcaatttctcccccagcaggctgcctacacgaccgtaacccaccagtagcgcatggttgcaaatatccactgggatctgcttctcttcttcgattgcctcttccagcgtctgctcttccagcgtttcggtcttcgccagatatttctccagtagtgcgaacagtaccgggttgagcataatgctcaggatcgcccctgccagtaccaggttttgtccggcctgcggcagtaaattcaatgccattcccagtcccgccaggataaacgcgaactcaccaatctgcgccaggctggcggcgatggttaatgccgtacgttgggagtgaccaaacagtcgcaccaggaaaaatgcggctaagctcttaccaaacagaataatcgccagcgtcgccagcactgccagcggttgctgaatcagaattaacggatcaaacaacatcccgacggagacaaaaaacagcaccgcaaacgcgtcgcgcaatggcagcgtatcgtgggcggcacggtgactcagttcagactcgttcagtaccatcccggcaaagaacgcaccgagtgcaaaggagacatcaaacagctctaccgcaccaaaggcaacccctaacgccagcgccagcacgctcagggtaaacagctcgcgagaaccggttgccgcgctgcgtgccataatccacggcaccagacggcgacctaccagcatcataatggcgataaatgcgatcactttgccgatggtgatccccatatcgactgcaagagtggcaaagcccacatcgccctgttccatcattcctgccactgcgggcagcaacaccagcgtcagaaccattaccaggtcttccacaatcaaccaaccgatggcgatttgcccacgctgactgtcaattaattgccgttcttcaagtgcgcgcagtaacaccacggtactggcggtggaaagacataaaccgaacacgataccggtcattaagctccagcccagcacggcagagagcgccatacccagcagcgtcgccacggctatctgggcgatcgcaccgggaatggcgatggcctttaccgccatcaaatccttcaggctaaagtgcaaaccgacgccaaacatcaacagaatgacgcccagttcagccagttccggggcaagcttggtatcggcaacaaagcccggagtgaatggtcctgccagcacacccgctaacagatatcccaccagaggagaaatacgtagtttattggccagcatgccgaggataaaggcgagcacaaggccgccaacaatggtggtgataagcggggtggcgtgatgcattccgtctccttttcctggtggttattgtccatttttggccgggaaaaccaaaattacaggtaatagtttatgacaatttcattgatgatgttcatgaataattattgaattttgcagaaaaatggaattagctgcaaaaaaagcacggatcggaaaacagaaggcggtttaacagaggaaaggcttatggcgactgtaaaacgatgcagccaaagtttgcctttggctgcaatgaaatcagtctttatgccggttatcaggcaggaatatggtcaacatccccaatagtggcaggaaagcacagattttatagactaactcgatgctggtgtgatcggcgataagccccagaactgccgctcccagacctcccatgccaaaagcaaaaccgaaaaagagtccagaaaccataccgatacgtcctggaagcagctcctgagcgtagaccagaatggcagagaatgcgctagcgaggataaatccaataatcaccgttaaaacccccgtccagtgcaggctggcgtagggtaaaatcagcgtaaacggcgcaacgccgaggatagagccccaaatcacatatttccgcccaattttatcccctacaggcccgccgatcaccgtacctgccgcaacggcaaacaggaaggcaaacagatgaagctgagcattctggatagataatccgaatttttgcatcagataaaaggtgtaatagctgctgatgctcgccatatagaaatatttgctgaaaatgaggattaacagaatgctgaccgccagtacaactttattgcgcggcagtggattgataatcgtcgctttgggttttcctttattcattcggtgctgtgcgctgtaccaacggctgatttgcgccaacaccacgatcgccagcagtgccgcaagcacaaaccaggcaacgttgcctttgccataaggcgcgataatcaccgccgccagcaagggtcccagggaactgccaaagttgccgccgacctgaaagatagattgcgccaggccatgccgcccgccggaagccatacgggccacgcgagaagattccggatgaaagacgctactaccggtaccgaccagcgccgccgccagcagaactgcgccaaaactgcccgccagcgcaagcagcaccagaccgcttaaggtaaagcacatgccaattggcaagctccatggcatcggatatttatcggtccagtagccgaccactggttgcagtaggctagaggcgagctggaaggtgagggttatcatgccaatctgcataaatgtcagagaaaattcactctgaagcagcggataaatcgccagaatcaggctttggatcatgtcgttcagcagatgactgaggctgatagcacctaaaataccaaagcttgttcgggccttggtcgtactcgcagccgcgcccgccacaggctggggttgttcactcattgccataggaaagtcactttttcagggttgcgatgtaaagaatgatcttatttgtgattattaccagactaacatacctgtatgcgtcgtctgaaggaagtctcaacgccgaatacagaatttctaatctggatgcagatttatcttcaccggacgcagacttgtctatgatgtcgcgtcatactatttttcaacacgttgaaatcaggtcagggagagaagtatgaaattattgcagcggggcgtggcgttagcgctgttaaccacatttacactggcgagtgaaactgctctggcgtatgagcaggataaaacctacaaaattacagttctgcataccaatgatcatcatgggcatttttggcgcaatgaatatggcgaatatggtctggcggcgcaaaaaacgctggtggatggtatccgcaaagaggttgcggctgaaggcggtagcgtgctgctactttccggtggcgacattaacactggcgtgcccgagtctgacttacaggatgccgaacctgattttcgcggtatgaatctggtgggctatgacgcgatggcgatcggtaatcatgaatttgataatccgctcaccgtattacgccagcaggaaaagtgggccaagttcccgttgctttccgcgaatatctaccagaaaagtactggcgagcgcctgtttaaaccgtgggcgctgtttaagcgtcaggatctgaaaattgccgttattgggctgacaaccgatgacacagcaaaaattggtaacccggaatacttcactgatatcgaatttcgtaagcccgccgatgaagcgaagctggtgattcaggagctgcaacagacagaaaagccagacattattatcgcggcgacccatatggggcattacgataatggtgagcacggctctaacgcaccgggcgatgtggagatggcacgcgcgctgcctgccggaagcctggcgatgatcgtcggtggtcacagccaagatccggtctgcatggcggcagaaaacaaaaaacaggtcgattacgtgccgggtacgccatgcaaaccagatcaacaaaacggcatctggattgtgcaggcgcatgagtggggcaaatacgtgggacgggctgattttgagtttcgtaatggcgaaatgaaaatggttaactaccagctgattccggtgaacctgaagaagaaagtgacctgggaagacgggaaaagcgagcgcgtgctttacactcctgaaatcgctgaaaaccagcaaatgatcagcctgttaagtccgttccagaacaaaggcaaagcgcagctggaagtgaaaataggcgaaaccaatggtcgtctggaaggcgatcgtgacaaagtgcgttttgtacagaccaatatggggcggttgattctggcagcccaaatggatcgcactggtgccgactttgcggtgatgagcggaggcggaattcgtgattctatcgaagcaggcgatatcagctataaaaacgtgctgaaagtgcagccattcggcaatgtggtggtgtatgccgacatgaccggtaaagaggtgattgattacctgaccgccgtcgcgcagatgaagccagatagtggtgcctacccgcaatttgccaacgttagctttgtggcgaaagacggcaaactgaacgaccttaaaatcaaaggcgaaccggtcgatccggcgaaaacttaccgtatggcgacattaaacttcaatgccaccggcggtgatggatatccgcgccttgataacaaaccgggctatgtgaataccggctttattgatgccgaagtgctgaaagcgtatatccagaaaagcagcccgctggatgtgagtgtttatgaaccgaaaggtgaggtgagctggcagtaatccgaaagtgccggatgtttgcatccggcacaatgcttaatcgcggcgggcgatatcagcaaatttggcatcgaggatctttgccagatcgcctgccgccagttcgatatccagtccgcgcttgccgccggaaacataaatagtggcaaattcttgtgcgggggcgtcgataatcgttggcagacgttttttctgccccagtgggctaatccccccaaccaggtatcccgtgctacgctgcgcgaccatcggatcggccatctcaactttcttggcacccagcgcttttgctacttttttaagatccagttgacctgcgaccggcgtaacggccacggcaaggtgtttcatatcaccgttcactgccaccagcagcgttttgtagacctgatccggattcaaacctaattttttgacgacttcatcgccaaaattggtttcagccggatcgtgctcgtaggtatggatttgaaagctaatcttgttttttcgagtaatttaactgcgggtgtcatggtaattttcctgccttaaacaaaaaaacgaagcaagcatacgcctgatggcggtccaaaaaaaagagtcatcttgcctaagagtattggcaggatggtgagattgagcgacaatcgagttacaccgtcgcttaaagtgacggcataataataaaaaaatgaaattcctctttgacgggccaatagcgatattggccatttttttagcgcaacatttgcggcaaattcccttctccatacaggtgtagtgcaccgaccgcgaccacatatcgccccggcggcatggcgcgtaatttatcccgccaggcgagatttcgctgatgcatcagcacatcgtacaggctctgactgaacgtattgggcagcgttatatcattattttgcggcggtgcattcagccaccagctcatcatttgttgcagcaaccgtgcgttggtatgccagtgggtcagcgtatcgtccagcagcgccagtcctttgtcagggagctggagcaacatggcaatctggttttcagccccttccagttcaatcacgggtttatgttgttgcttcgccgcctgcaatagctggtaatcgataccgtattctgcccgcagccccagtttttgtgcctgcgtcgcctgaagaaccatcgcgatttgccacagcggttgggtagaaaagagactgggagaaatgcccatctcctggctaatgtgctgcaggttttggagttgctcctcgctaatgcgctcttccagcgcctcgcaggcaggcaaattagcaaaaggcgtatcgctggtggaaacatccgcctcgacgatcagcgcatcggcgtttttgagctttttgagcaaacgggtgggcaggggagccatatcgtggctacccatatgaatactgccaatcagatgaaaatggcgattgccggggagggtgatatcgatggcaggccaggtgtaatgattaccgcgcagcgcggcccaaagcgtttttacccggtacaacagatccatacgacctccctttgtgaaatatcatgctagcgcgcggtgagggatggcgcaaatggagttggagacttgtttaatgtgtttgtatgattcagtatgttcttgcatcgctattcacaaggaagcaacagttaaaaaccatgaaacaggcaacaagaaaaccgacgacacccggagatattcttctctatgaatatctggaaccgctcgatttgaaaatcaatgagttagcagagttgctgcatgttcatcgtaatagcgtcagtgcactgatcaataacaatcgtaaactcactactgagatggcatttcgtctggcgaaagtttttgataccacagtcgatttttggctaaacctccaggcggcggttgatctttgggaagttgaaaacaacatgcgcacccaggaagaattgggacggattgaaacagtggctgaatatttggcacgccgtgaagagcgtgcaaaaaaggtcgcgtaaggccaaaacatcgcttcatctcgtaggccggataaggcgttcacgccgcatccggcatccgagcaccattgcctgatgcgacgcttacccgtcttatcaggcctacaaacttgtgcctgaaccgtaggccggataaggcgtttacgccgcatccggcatccgagcaccattgcctgatgcgacgcttacgcgtcttatcaggcctacaaacctgtgcctgaaccgtaggccggataaggcgtttacgccgcatccggcagtcatgcgtcgatgccaaatgcgccaccctaaagcagcgcatccgcaatgatgtacttattccttcggtttaaaccgcagcaaccggttggcgttactcactacggtaatgctgctgagcgccattgccgctccggcaactaccgggttaagcagtgttccagtgaacggccacaaaataccggcggcgaccggaataccgatactgttgtagataaacgcaccgagcaggttctgcttcatgttgtgcagcgttgcgcgggaaatagcgagcgcatccgcaacgcccatcaggctatggcgcatcagggtaatcgccgcggtttcaatggcaacatcactgccgccacccatcgcaatgccgacatccgcctgagccagcgctggcgcgtcgttaatgccgtcgcccaccattgccacctaacgtccttcactttgcagatgtttgatcgcttcggctttaccgtccggcagcaccccggcgatcacctcatcaatccctgcttctttggcgatcgcattggcggtggttgggttatccccggtcaacatcaccagacgatatcccgctttatgcaggcgttgcagcgccgccacgctatcactacgcaacggatcgcgtactgccagcagggctaccgctttcccgtcaaccgccagcagcacaggcgttgccccttggcttgcctgagcagtaatctccgcttcgatagctttggtaccaacctgttgctcatttaacagcgcctgattgcccagcaataacgcatgaccttcagcttcaccgctcacgcccagcccgcgcaatgtgcggaaaccgttgacctgcggtagctgcatatcacctgctttatcgaggatcgctcgtgccagcggatggctggaaccttgctccagtgccgccgccagacgcaatgcctgcgcttcatcaacatcagcaaatgttttcactgcgacaacctgcggcttcccttcagtcagcgtcccggttttatcgaacactacagtgtcgagtgtactggcgcgttgcagcgcgtcagcgtcccgcaccagcacgccaaactcagccgcccgcccgacgccggaaataatgctcatcggcgtcgccagccccagcgcacacggacaggcaataatcagtaccgtggtggcaatcaccagggtatagacaatctgcggtgccggaccaaagaaataccagattgccgcactgacaagcgcaataaccaccactaccggcacaaatacggcactgattttatccgccagctgaccgatttctggcttgctgctctgggcctggcgcaccatgcgaatgattcgactcagcgtagtatggctgccaaccgcactggcacgaaacagcacactgccgtcctgtaccactgtcccggcatggacgctatcgccttcgcctttttgctgcgggattggttcgcccgtcagcatcgcttcatccagccatgcttcgccctgggtaatctcgccatctaccggcacgcgatcgccggtcgtcaggcgcagcaacatacctggctgcacttctgccagaggcacgcttttttcaccttcgtcagtaaccaggcgtgccgtcggcggggttaaatcgagtaacttttccagcgccttagaagaacgctggcgtgcgcgcgcttccagcatatggccgagattgatcagaccgataatcatcgcgctggcttcgtaataaagatgtcgcgcttccatcgggaaccactgcggccacaggttgacgctcatgctatagagccacgccacgccagtacccagcgccaccagcgtatccatcgtcgccgcaccgttcagcaggcttttccatgcactgcggtaaaaatggccgccggcgaaaaccatcactgccagggttatcaggccgataaccaaccacaggctgcggttgtcagcggtgaccatcatgttatcgccgatcatcccccagaccatcaccgggatacccaccgccagtgcgacaattgcctgccagcggaagcgcttcatcgtagcgacggcggtttcttgctggcgctcgcggcgtttagcgtcatcttcaatcgcttccgcgccgtagcccgctttttccaccgcctgcactaaatcttgtggggaggcactgcccatcaccagcgcagtacgctccgccaggtttacccgtgcctgagtgacgcccggtacgctttgcagcgcattttgtacgcgggtgacacagctggcgcagctcatgccgctcagcagcaactgctggctgtcatcgtcatcggcggtcgctgccggaagcgcctcagaaaccgctgtcagtgcttcgctcgggatactactctccgccagcggtttagcctttgggtggcttacagatgcgtcataacccgcttgtttgatggtttcgatcagctgttctgcactggcagtcccggtaacgtgcgcttcagtgatagacacatccgcctgctcaacatccggacgctgttcaagactttctttcacgcgtttaacgcagtgaccgcaggacaggccgtccagggtcaggtcgatagtttgactcataaaacactcctttaagacagttttgactggctgtgataaaggttaaaccttccagcaaggggaaggtcaagaaattaataaaccaggcgggtaaaagtccgtaaagattaaaaaatcggctcgatttgcatcaggattagacatttatctctttgttttcctgtagttaagttgcgggtgctaagttaaatcaggatgcctgaaaatcggcaccggggtgaggaattacctcccgcatctataaaaaggagttaacaaaagatgttagatgcaaacaaattacagcaggcagtggatcaggcttacacccaatttcacagtcttaacggcggacaaaatgccgattacattccctttctggcgaatgtaccaggtcaactggcggcagtggctatcgtgacctgcgatggcaacgtctatagtgcgggtgacagtgattaccgctttgcactggaatccatcagcaaagtctgtacgttagcccttgcgttagaagatgtcggcccgcaggcggtacaggacaaaattggcgctgacccgaccggattgccctttaacagtgttatcgccttagagttgcatggcggcaaaccgcttagcccactggtaaatgctggcgctattgccaccaccagcctgattaacgctgaaaatgttgaacaacgctggcagcgaattttacatatccaacagcaactggctggcgagcaggtagcgctctctgacgaagtcaaccagagcgaacaaacaaccaacttccataaccgggccatagcctggctgctgtactccgccggatatctctattgtgatgcaatggaagcctgtgacgtgtatacccgtcagtgctccacgctcctcaatactattgaactggcaacgcttggcgcgacgctggcggcaggtggtgtgaatccgttgacgcataaacgcgttcttcaggccgacaacgtgccgtacattctggccgaaatgatgatggaagggctgtatggtcgctccggtgactgggcgtatcgtgttggtttaccgggcaaaagcggtgtaggtggcggtattctggcggtcgtccctggagtgatgggaattgccgcgttcagtccaccgctggacgaagatggcaacagtgttcgcggtcaaaaaatggtggcaagcgtcgctaagcaactcggctataacgtgtttaagggctgatcatgatgaacacggaaggtaataacggtaacaaacctctcggtctatggaacgtcgtttccatcggcattggggcaatggtgggggcggggatcttcgcgctgctggggcaggctgcattgctaatggaagccagcacctgggtcgcctttgcttttggcggtattgtggcgatgttttccggttatgcctatgcgcgtctgggggcgagctatcccagcaatggcggcattatcgacttctttcgtcgcggattaggcaacggcgtctttagcctggcgctcagcttactgtacctgttgacgctggcggtgagcatcgccatggtcgcccgtgcttttggcgcttatgccgtgcagtttttgcatgaaggcagccaggaggagcaccttattttgctctacgcgttggggatcattgcggtgatgacgcttttcaactccttaagcaaccatgcggtagggcggctggaagtgatcctcgtcggcattaaaatgatgatcctgttattgctgattattgccggtgtctggagcctgcaaccggcgcatatttccgtctctgcgccccccagctccggtgcgttcttctcctgtattgggataactttccttgcctatgcgggctttggcatgatggcgaacgcggcggataaagtgaaagatccgcaggtcattatgccacgggcgtttctggtggcgattggcgttaccacgttgctttatatcagcctggcactggttttgcttagcgatgtaagcgcattagagttagaaaaatatgccgataccgccgtagcgcaggctgcttctccgctgctcgggcatgtgggttatgtgatcgtcgtcatcggcgctttactggcgacggctagtgccattaacgcgaacctgttcgccgtgtttaacatcatggacaacatgggcagcgaacgcgaactgccgaagctaatgaataaatccctgtggcggcagagtacctggggcaacattattgtcgtggtgttgattatgctgatgacggcggcactgaatttaggcagtctcgccagcgttgccagcgccacctttttgatttgctacctggcggtgtttgtggtggcgatccgcctgcgtcatgatattcacgccagcttgccgattcttatcgttggtacgttggtgatgttgttggtgatcgttggctttatctacagtctgtggtcccagggtagccgtgcgttgatatggattattggcagtctcttactcagccttattgtggcaatggtcatgaagcgcaataaaaccgtataacatctctctgtgcgcagtacttcctgtattattgtggtggcggtcgatattcgcactggcaaaaaaacgtgcttgaatatctgttgaaaccctttaacaaagcacaggaggcgttgcgcgaacgatgaacatcagcgatgtagcaaaaattaccggcctgaccagcaaagccattcgcttctatgaagagaaggggctggtgacgccgccgatgcgcagcgaaaacggttatcgcacctacacgcagcagcatctcaacgaactgaccttactgcgccaggcacggcaggtgggctttaacctggaagagagcggcgagctggtgaatctgtttaacgacccgcagcggcacagcgccgacgtcaaacggcgcacgctggagaaggtggcggagaacgaacgacacattgaggagctgcaatccatgcgcgaccagctgctggcactggcgaatgcctgccctggcgatgacagcgccgactgcccgattatcgaaaatctctccggctgctgtcatcatcgggcagggtgattaagagctgacggctcggatatgtagggttatcccttctatcgcaatgacttcaacatgcgtacctgcaccgagatcctcgctggcgctgacaggccaactactgtcaccgacgcgcatatgaccgcgcccgttgaccagcggagattccagcacaaaacgtcggccaatcagctgctgcccgcgctggtttaaatgactatcgctgtgcttttgttcgcgcacccgccggctcaaccatttccaccacagccaggcggcgagcagcgtcaggatggcaaacattaccccttgccactcccaacccagcggcaccagccagaccaccaggccggtaatcaccgctgccacgccgctccacaacaaataaccatttccgcccagcatctcggctgccagcagcaaaccgccgagactgagccagaaaatatgtggatgaacgaccattaactccatcatggctgagtccgtttgttggcgctgtctttcaccagctcggcaatcccggcaatgctccccatcaggctgctggcctctaatggcatcatcactactttgctgttactggaggaaccgatctgctgtaacgcttcggtgtatttctgcgctacgaagtagttcaccgcctgaatatcaccggaggcgatagcttcagacaccattttggtggcgcgggcttctgcttcggcggaacgttcacgcgcttcagcctgtaaaaacgcgctctgacgttcgccttccgctttcaggatttggctctgtttttcaccttcggctttgaggatttccgcctgacggatcccttccgcttcaagaatgtaagcgcgtttggtacgttccgctttcatctgcgcgttcatactagagataagctctgccggtgggcgcacgtcgcgaatttcaatacgggtgactttaatcccccacgggttggtggcttcatcgacaatacgcagcaggcgactgttgatgctgtcgcgctgagagagcatttcgtcaagttccatactacccagcacggtacggatgttagtcatggtcaggttgatgatcgccagctccagattgctgacttcataagccgcgcgcggcgcgtcaatcacctgaataaagcacacggcgtcgatggtaacgttggcgttatctttgctgataacttcctgggaagggatatcgagcacttgctccatcatattgatcttgcgaccaatgcgatccataaacggcaccaccagactgagccccggctgtaacgttttggtatagcgaccaaagcgttctactgtccactgatagccctgcggtacgattttgacacccgcgccgacaatgaccagcgcgacaaaaatgagaatcgggataaagataagcatcggaaaaacctcctgttgtaccgtccataatcagcaaaattgctgcttgattaaacaaattatacctgattactgaaagagagttcccccttattcctgcgaaggataaactgtttttagtaaaaatcagaaaaagggaacagcgatgcaggaaaatagtcctttgcttcagctacaaaacgtaggatatctggcgggtgatgcgaagattcttaataacatcaattttagcctgcgtgctggcgaatttaagttaattaccggtccttctggttgtggcaaaagtacgctgctaaaaatagttgctagtttgatcagcccaaccagcggaacgttactgtttgaaggtgaggatgtcagcacactaaagccagaaatctaccgccaacaagtctcttactgcgcccagacaccgacgctgtttggcgatacggtatacgataatctgatctttccctggcagatccgtaaccggcagcctgacccagccatttttctcgattttctcgaacgcttcgccttgccggacagcattttgacgaagaatatcgccgagctatctggtggtgaaaaacaacgcatcagtttgattcgtaacctgcaatttatgccgaaggttttattgctggatgaaataaccagtgcgctggatgaaagtaataaacataacgtcaatgagatgatccatcgttatgtgcgcgagcaaaatattgccgtgctgtgggtgacacacgataaagacgaaattaatcatgcggataaagtgattacactgcaaccgcatgccggagaaatgcaggaagcacgctatgaactcgcataactaaagaaatgcaggaagcacgctatgaacagccataatattactaacgaaagtttagcactggcattaatgctggtggtggtggcaatcttaattagccataaagaaaaactggcgctggagaaaaatattctctggagcgtcgggcgagcgataattcagctgattattgtcggctatgtgctgaagtatattttcagcgtggatgatgccagcctgacattattgatggtgttatttatctgctttaatgcggcgtggaacgcgcaaaaacgcagtaaatatattgctaaagcttttatcagtagctttattgccattacggtcggggcgggaattaccctggcggtgctgattctcagtgggagcattgaatttatcccgatgcaggtgatccctatcgccgggatgattgccggtaacgccatggtagcggtggggttgtgttacaacaatttagggcaacgggtcattagcgaacagcaacagattcaggagaaactgagtcttggtgcgacgccgaagcaggctagtgcgatattgattcgcgacagtattcgcgcggctttaattccgacggtcgatagtgcaaaaacggttggcttagtgagtttaccaggaatgatgtccgggctgatatttgccgggattgatccggtgaaggcgattaaatatcagattatggtgacctttatgctgctcagtaccgccagcttgagcaccattattgcctgctatttaacctatcgtaagttttataatagccgccaccagttggtggtgacgcaattgaagaagaaatgatgcgatgccggatgcgcagcatcgcatccggcgttgtggttcatgtgccgatcaacggaatatcaatacaacaatgcatacagctggcggcgatacttgctcgccagtgcatcacccgtacccagcgcagcgaggatctcctggaacgttttacgcgtctgaccgtctgcggcggtgagatctttacgcagatgcccgaacagcaactccagcgcctcttcattgcgcccaacctgatgcagttgcagcgccagttgcgtcgccagtgcggcatcttctggattctccgccacctgctgttgcaactgttgaatttccggcgtatcagccgcctgcttcagcagttcgatttgcgccaccagcccctggtagcgggtgtcctgatcctgcaacggaatggttttcagcaccgcttccgcatcttcagaacggttcagcgcaatcagcgtttctgccagcagcaggccgatctccccgttctgattgctcaactgccaggcgtctttcagcaatggcagggcatcggtgtaattgctttcctgcatcagttgcatcgcctgctgcgctttcagctcttcttcgcgcggcagcactttatccagcagggcgcggatcgcctcttccggttgcggcccctggaagccatctaccggttgcccgttctggaacagatacacggtcggaatcgcacgcagaccaaactgcgcggcaatcatctgctccgcgtcgcagtccagcttcgccagaataaattgcccgttgtactgcgccgcgaggctttccagaattggggttaactgcaaacagtgctggctacgttcagaccaaaaatagaacagcaccggagtggtcatgctctgttcaagaacctgttgcaggttagattcgttaatgttgacaatattttctacggacatggagtcgctctctgttgtcgatattttctttgacatgggggcttaagcgcgcgcttcaactcacccctgcaatattttgtccatcacgcgccccggcagcaggcgcttaagcaccattaccgcccaggtcaccagcgtcaccggatagcgcatcttcggcttctcgctaataaaagcatggcgtactttgtccaccaccgcttccggtcccaacgtaaagcgggcggcgatgccgggattttcgactggtttatcactttgcgtctggttgacgttgtcggtgaagcgagtacgaatgggaccgggttcgatcaggctgactttaattccgctgtggcgcagctccatgcgcagtgcatcactccacgcctccagcgcatatttactggccgcgtaagcgccacgacccggcgtggagattaatcccatcacgctacttgtcatcacaatacgcccttcaccgtgcggtaacatcgcgggtaacaggcgcatggtgagctggtgtgcgccgaaaaagttggcggaaaactgctgttccatctgcgcacggctgatggtggaaagggggccatacatgccgaatccggcattgttaaagatcccatacagacaattatcggtcagggcgatcacctcgtcggctgcgcgatcaacactttctggactatccagatcgatcaacacgccggtaaatcccatgctgttcatgcgctcaacatcatccggtttccggcaacctgccagcacatgaaaaccctggcgttttaattcgagcgcgctttccaggccaattccactggaacatccggtaattaagacgcttttttgcataactttacctgtcaggatctccgttgctttatgagtcatgatttactaaaggctgcaacttatttaactgtcatgatttactaaaggctgcaactgcttcgccatccagtcggcaataaacggctgggcgtcgcggttgggatgaataccgtcatcctgcatccattgtggcttgaggtagacctcttccataaaaaagggcagcagcggaacatcaaactctttggcgagtttggggtaaatggcgctaaaggcttcattataacggcgaccatagtttgcaggcagacgtatttgcattaacaatggttcagcgttggcggctttgacatcctgcaaaatctggcgcagcgtttgctcggtttgctgtggctgaaaaccacgcaaaccgtcattgccgcccagttcaaccagcacccaacgcggctgatgctgtttcagcagagccggaaggcgcgccagtccttgttggctggtgtcgccgctgatgctggcattaactacgctcgttttactctgccacttatcattcaacaaggcaggccaggccgcgctggcagacattcgatacccggcgctcaggctatcacccagaatcaataacgtgtccgctgcggcggcacggaaggttaacaggaccaggaacaggaagggcaaatgccagcggaaaacattgttgaagttcatcatcttaagaagtccgtcggtcagggggagcatgaactctccatcctcaccggagttgagctggttgtcaaacgtggcgagaccatcgcactggtgggcgagagcggaagcggtaagagtaccttgctggcgatcctcgccgggcttgatgacggcagcagtggcgaagtgagtctggtgggacaaccgctacataatatggacgaagaagcgcgggcaaagttgcgcgcgaagcacgtcggctttgtttttcagagttttatgttaattcctacccttaacgcgctggaaaacgtcgagcttccggctctgctgcgcggtgagagtagcgcggaaagtcgtaacggggcgaaagcgttgctcgaacagttagggctgggtaaacgtctggatcatcttccggcacagctttccggcggtgaacagcaacgagtggcgctggcacgagcctttaatggtcgacctgatgtgctgtttgccgacgaacccaccggcaaccttgaccgccagacgggcgataaaattgccgacctgctgttttccctcaaccgtgaacatggcaccacgttgattatggtgacccacgacctgcaactggcggcacgctgcgaccgctgcttacggctggtgaacgggcagttgcaggaggaagcatgattgcacgttggttctggcgcgaatggcgtagcccgagcctattaattgtctggctggcgctaagcctggcggtggcctgcgtgctggcgctgggcaatatcagcgatcgcatggagaagggcttaagccagcaaagccgtgagtttatggcgggcgatcgggcgttgcgcagtagtcgcgaagtgccgcaagcgtggctggaggaagcgcaaaagcgcggcctgaaagtcggcaagcagctgactttcgccacaatgacctttgcaggcgacacaccgcagctggcgaacgtcaaagcggtggatgatatctacccgatgtatggcgatctgcaaactaatccccctggcctgaaaccgcaggcgggcagcgtattgctggccccacgcctgatggcactgcttaacctgaaaacgggcgacaccattgacgtgggcgatgccaccttgcggattgccggagaagtgattcaggaaccggattccggttttaaccccttccagatggctccgcgtctgatgatgaatctggcggatgtcgataaaaccggagccgtgcagccggggagtcgggtcacctggcgttataaattcggcggcaacgagaaccagctcgacggctatgagaaatggttgttacctcagcttaaacccgaacaacgctggtacggtctggaacaggacgaaggcgcgctggggcgaagcatggaacgcagccaacagttcctgctgcttagcgcgcttctgaccttgctgctggcagtggcagcggtggcggtagcgatgaatcattactgtcgcagtcgctacgatctggtggcgatcctcaaaacgctgggggcagggcgagcgcaactgcgtaagctaatcgtcggtcagtggttgatggtgctgacgcttagtgccgttaccggtggggccataggcctgttgttcgaaaacgtgttgatggtgctgctcaagcccgttctgcctgctgcactaccgccagccagcctctggccgtggctgtgggcgcttggcaccatgacggtcatcagcctgctggtggggctacgaccatatcgcttgttgctggcaacgcagcctttacgcgtattacgtaatgatgtggtagcgaacgtctggccgctgaagttttatctgccgattgtcagtgtggtggttgtgctgctgctcgccggattaatgggtggcagcatgctgctttgggcggtgctggcgggcgcggtagtactggctttgctgtgcggtgtgctgggctggatgctgctgaatgtacttcgccgcatgacgctgaaaagcctgcctctgcgcctggcggttagccgcctgttacgtcagccgtggagtacgttaagtcagcttagcgcatttagcctctcctttatgctgctggcactgctgctggtgttgcgtggcgatctgctcgaccgctggcagcagcagctacctccagaaagcccgaactactttttaattaacatcgccacagaacaggtagcaccgctaaaagcgttcctcgcggaacatcagatagtcccggaaagcttttatccggtggtgcgggcgcggctgacggcgattaacgataagccgacagaaggtaatgaagatgaggcgcttaaccgcgaactcaatcttacctggcaaaatacgcggcccgatcataatccgattgtcgccggtaactggccgccaaaagccgatgaagtgagcatggaagaggggctggcgaaacgcttaaacgttgccctcggtgataccgtgacttttatgggcgatacccaggagttccgcgctaaagtgaccagcctgcgcaaagtggactgggaaagtctgcggcctaatttctattttattttccctgaaggggcattagacgggcaaccgcagagctggcttaccagtttccgctgggagaatggcaacggcatgttgacacaactcaaccgccagttcccgaccattagcctgttagatattggcgcgattttaaaacaggtcggtcaggtgctggagcaggtaagtcgggcgctggaagtgatggtggtactggtcaccgcctgcggtatgttgctgttgctggcacaggtgcaggtgggaatgcgtcagcgtcatcaggagctggtggtgtggcgcacactcggtgcggggaaaaaactgctgcgtaccacgttgtggtgtgagttcgccatgcttgggtttgtttccggcctggtggccgcaattggtgcggaaacggcgctggcagtgttgcaggcgaaagtgtttgattttccgtgggagccagactggcgattgtggattgttctgccgtgcagcggagcgctgctgctgagccttttcggcggctggctgggtgcgcgactggttaagggtaaggcgctgttcaggcagtttgcggggtgatgagagtccctcattaccgcgccttaacccattccgccacttccgcccactcaccgcgaaagacaactttttccgcttttttctcaagctgatagcgatacatcgggtcgtaatattcttcaagtaacggcaccagccaggccagatgaccgtcggtgctgccggtggtgagttgcgttgtcagtgctgcatccagccttgcagccagttcgttatagcgctgtagccccagccgacgcttaatcgcgctaagtccgtgatgcaggtattcgcaatactcctgccagccctgttcgtcgccgtacgcgtgggtaaaatcatgatgcatacgcaagaaatactcttcgttcaggcgctcaagacggatctcaaacggatcttctaccaccgcaatcgccgcctgagtcattcgctcgcgcaggcattccggcaggtgattgctaccgatcatccggctttcgtcttccagcacccacaggcgcaaattctgacgggcgtcggtttttagcatttcggcagccagcaggttttcaaaactcgcctggctaagttgtggttgtaacgtgcgaccaaacgcgctaccgcgatgacgcgccaacccttccagatcaacaccgttcggctgttgctgcactaacagcgttttaccgctgccggtacaaccgccaatcagcactatcggtttttgtgccagttcaatagtcgcctgaatcgcggtctggcgcagtgccttataaccgccttccaccagcggataatcaatccccgctgcatgcaaccagctttacacaatatgactgcgctgaccgccacgggcgcagcagagaataccttgcggattttgcaggcacgctgcccgccaggcgtccatgcgctgctgacgaatttcacccgccaccagtttatgtcccagcgccagcgctgcgtcactgccttgctgtttatagcaggtgccaacggcggcgcgttcatcgttattcattaacggcagattgatagcggcgggcattgcgccgtgctcaaactcgataggggcgcgaacatcaataatgggcgtatcagcaatcagcagggcacgatagtcctgttccgtgtgtctctcttgcatagttaaaagtgaacctcaaatcagcttgcgcgctattttacgcgccaacgcgcaaggaaacttgatttttaactgcgtgggttgccgaaaatttctaaaaatccgctgatttccggcctgcgctgggtaaacaaggtcacaatatcttctaccgctttgccgctgccaaatttgcgccatgccagactcaatgggctaggagggcgcatcgttgggattacccggctgaccagttgttgattatcgatcatactctggcaaaggctttttggcaaaaaaccaatgccaacgcccgccagatgggcggcgattttcgtttccatatcgggaacaataatctctttttgccctggcaatcgccaggcgacgcgtttggttaaggtgcgggcgctgtcttcaatattgaccgccggaaagcgccgcaactgcgcttctgttagcggctcttcaacgttcgccagcggatgatccgccgccatgacaaagcgccattgcacgcttcctaagggatcaagactaaaggtatttgccagcgcctcagttcccgtgacgccgatagccaggctaaaaccttcgtacaataggctgtcccagacgcccatatagatttgtcgggagatgtgaaactgggtaaaggggtaacgctcattcagccacgccagcaactgggcgacggcctgggggttatagagcaggttgttgatgacaatattcacctggcgttccacgccatcattcacctgttgcagctcgcttggcatactttccagccagctcagccagtctctggcctgggaaagtagatgctcgccagccgctgtcaacgtcacgctgcgagtcgtacggaaaaacagcgctactccggtattctcttccagaagtttaatgcgataactgatcgtcgccgtggttttacataatcgttctgccgctttactaaaacttcctgtttcagcaaccgcaatgaaagtccgcaaggtttctggatcgaacatcttcaggtatccccttttaaatccgcaagttgcgtgattttcttatcctctgatttatcagtatttttacatgataaccctgttcaatttgtggactaaatctagttttggaaaaatattccaacttttgtattgatgttgttctcttaaggttttagattgcctgttattgaaaccaagctgaccggtcggcggtggttgaacggaattatgttacaaggacaaaaagatgaaacttcaggtattaccgttaagtcaggaagcctttagtgcttatggcgacgtaatcgaaacgcagcaacgggattttttccatattaacaatggcctggtggagcgttaccacgatttggcgctggttgagattcttgagcaagactgtacgcttatcagcattaaccgcgcgcaaccggcgaatctgccgctgaccattcacgaactcgaacgtcatccgctgggtactcaggcctttatcccgatgaaaggtgaggtgtttgtggtggtcgtggcgttaggtgacgacaaaccagacctgagtacgctgcgggcgtttatcaccaacggcgaacagggagtgaattaccatcgtaacgtctggcatcacccacttttcgcctggcagcgcgtcaccgattttctgaccatcgatcgcggcggcagtgacaactgtgatgttgaaagtattcctgaacaggaactctgttttgcgtgacgcctgcaaccgacttgcataagataaactaattgttcattgtttatgctcacttgtaggtcggagttaacgtaggtatgacggaagttagacggcgcggcaggccaggacaggcggagcctgtggcacagaagggcgcacaggcgttagagcggggaattgcgattctgcaatatttggaaaaaagtgggggaagtagcagcgttagcgatatttctctcaatctggatttgccgctctccacgacctttcgcttgctgaaggttttacaggcagcggattttgtctatcaggacagtcaattaggctggtggcatataggattaggtgtctttaacgtcggtgcggcgtacatccataaccgcgatgtcctctccgtcgccgggccgtttatgcgccgcctgatgttactttccggcgaaacggtcaatgtcgcgatccgtaacggcaatgaagcggtattaattggtcagttagagtgtaaaagcatggtcaggatgtgtgcgccactgggcagtcgtctgccactgcatgcttccggtgcgggcaaagcgctgctttatccgctggcggaagaggagttgatgagcatcattctgcaaaccggtttgcagcagtttacgccaactacgcttgtggatatgcccaccttgctgaaggacctggaacaagcgcgtgaactgggctataccgtagataaagaagagcatgttgtaggtctgaattgcatagctagtgcaatttacgatgatgtcggtagtgttgttgccgctatctccatctccgggcctagtagtagactgacagaagatcgttttgtcagtcagggtgagctggtcagagacaccgcccgcgatatcagcacggcgttgggactgaaagcacatccataatgtctgtcgcatcccgctctgcggagcgggtttttttgacaaaatttgaaagttggaaaaattttccaataaatagaggtaggaataaaatggcaaaaatgagagccgttgacgcggcaatgtatgtgctggagaaagaaggtatcactaccgccttcggtgttccgggagctgcaatcaatccgttctacagtgcgatgcgtaagcacggcggtattcgtcacattctggcgcgtcatgtggaaggtgctagccacatggcggaaggttatacccgcgcaacggcagggaatatcggcgtatgtctggggacttccggtcctgcgggcacggacatgatcaccgcgctctattccgcttctgctgattccattcctattctgtgcattaccggccaggcaccgcgcgcccgtctgcataaagaagattttcaggccgtagatattgaagcaattgctaaaccggtcagcaaaatggcggttacagttcgtgaagcggcgctggtgcctcgcgtgctgcaacaggcatttcacctgatgcgttctggtcgtccgggtccggtactggtggatttaccgttcgacgttcaggttgcggaaatcgagtttgatcctgacatgtacgaaccgctgccggtctacaaacctgctgccagccgtatgcagatcgaaaaagctgtagaaatgttaatccaggccgaacgtccggtgattgttgccgggggcggggtaattaatgctgacgcagctgcactgttacaacagtttgctgaactgaccagcgttccggtgatcccaacgctaatgggctggggctgtatcccggacgatcatgaactgatggccgggatggtgggtctgcaaaccgcgcatcgttacggtaacgcaacgctgctggcgtctgacatggtgtttggtatcggtaaccgttttgctaaccgtcataccggcagcgtagagaaatacaccgaagggcgcaaaatcgttcatattgatattgagccgacgcaaattggtcgcgtgctgtgtccggatctcggtattgtctctgatgctaaagcggcgctgacactgctggttgaagtggcgcaggagatgcaaaaagcgggtcgtctgccgtgtcgtaaagaatgggtcgccgactgccagcagcgtaaacgcactttgctgcgcaaaacccacttcgacaacgtgccggtgaaaccgcagcgcgtgtatgaagagatgaacaaagcctttggtcgcgatgtttgttatgtcaccaccattggtctgagtcaaatcgctgcggcacaaatgctgcatgtctttaaagaccgccactggatcaactgtggtcaggctggtccgttaggctggacgattccggctgcgctaggggtttgtgccgctgatccgaaacgcaatgtggtggcgatttctggcgactttgacttccagttcctgattgaagagttagctgttggcgcgcagttcaacattccgtacatccatgtgctggtcaacaacgcttatctggggctgattcgtcagagtcaacgcgcttttgacatggactactgcgtgcaactcgctttcgagaatatcaactccagtgaagtgaatggctacggtgttgaccacgtaaaagtagcggaaggtttaggttgtaaagctattcgggtcttcaaaccggaagatattgcgccagcctttgaacaggcgaaagccttaatggcgcaatatcgggtaccggtagtcgtggaagttattctcgagcgtgtgaccaatattagcatgggcagcgaactggataacgtcatggaatttgaagatatcgccgataacgcagcggacgcaccgactgaaacctgcttcatgcactatgaataagggagataaataatgttacgtttctctgctaatttaagcatgttatttggagaatatgattttctcgcccgttttgagaaagctgcgcagtgtggttttcgcggcgttgaatttatgtttccttatgactacgacattgaagaattaaaacatgtgctggcgagtaataaactcgaacatacgctgcacaatttaccggcgggtgactgggcggcgggggagcgcggtattgcctgtattcctggccgtgaagaagagtttcgggatggcgtagcagcagcgattcgttatgcccgtgcgctgggtaataaaaaaattaactgtctggtcggtaaaacgccggctggtttcagcagtgaacagattcacgcaacgcttgtagaaaacctgcgttatgccgcgaatatgctgatgaaagaagatattttattactgattgaacctattaaccattttgatattcctggtttccatctcaccggaactcggcaggcgctgaaattgattgatgatgttggttgctgcaatttgaaaattcagtatgacatttatcatatgcagcggatggaaggtgaattaaccaacaccatgactcagtgggctgataaaattggtcacctgcaaattgccgataatccgcatcgcggcgaaccgggaaccggagaaattaattatgattatctctttaaggtaatcgaaaattctgactacaacggttgggttgggtgtgaatataaaccccaaaccaccacggaagccggtttacgctggatggatccgtaccgttaaaacgtaacgctattcagacaatgcttttttaggccgctaagttggcaggggatcgtgttgtctgaattcaggaaaagcgaaatttaaaagaggttaattatgaaactgggatttattggcttaggcattatgggtacaccgatggccattaatctggcgcgtgccggtcatcaattacatgtcacgaccattggaccggttgctgatgaattactgagtctgggtgccgtcagtgttgaaactgctcgccaggtaacggaagcaagcgacatcatttttattatggtgccggacacacctcaggttgaagaagttctgttcggtgaaaatggttgtaccaaagccagcctgaagggcaaaaccattgttgatatgagctccatttccccgattgaaactaagcgtttcgctcgtcaggtgaatgaactgggcggcgattatctcgatgcgccagtctccggcggtgaaatcggtgcgcgtgaagggacgttgagcattatggttggcggtgatgaagcggtatttgaacgtgttaaaccgctgtttgaactgctcggtaaaaatatcaccctcgtgggcggtaacggcgatggtcaaacctgcaaagtggcaaatcagattatcgtggcgctcaatattgaagcggtttctgaagccctgctatttgctagtaaagccggtgcggacccggtacgtgtgcgccaggcgctgatgggcggctttgcttccagtcgtattctggaagttcatggcgagcgtatgattaaacgcacctttaatccgggcttcaaaatcgctctgcaccagaaagatctcaacctggcactgcaaagtgcgaaagcacttgcgctgaacctgccaaacactgcgacctgccaggagttatttaatacctgtgcggcaaacggtggcagccagttggatcactctgcgttagtgcaggcgctggaattaatggctaaccataaactggcctgatacccgcaataaaaatggccgatatcagaaaatgaatcggccagcaatattaaaaaagaaagcagccaaagatgttgctagtgtattaaaaataatatttttattttatttgttcctcatagctagattaaaacaacgttatagcatacgtgaaattaagagggatttatggaacatcagagaaaactattccagcaacgcggctatagcgaagatctattgccgaaaacgcaaagccagcggacctggaaaacatttaactattttaccttatggatgggtagcgttcataacgttcccaattatgtgatggtcggcggcttttttattctcggcttgtctacctttagtattatgctggcaattatcctcagcgcctttttcattgccgcggtaatggtattaaacggtgctgcgggcagtaaatacggtgtgccttttgccatgatcctgcgtgcttcttacggtgtacgtggtgcactgtttcccggattattaaggggcggaattgccgccatcatgtggtttggtttgcaatgttacgcggggagtctggcctgcttgattctgattggcaaaatctggccgggatttttaactctcggtggtgatttcactctgttaggcctttctctaccgggcttaattactttcttaatcttctggctggtcaacgttggtataggttttggcggtggcaaagttttaaataaattcactgccattcttaacccgtgcatctatatcgttttcggcggtatggcgatttgggcgattagtctggtcgggatcggtccaatctttgactacattccgagcggtattcagaaagcagaaaacggtggcttcctgttcctggtggtgattaacgcggtagttgcggtctgggcggcaccggcggtgagcgcatccgactttacgcaaaacgcccacagctttcgtgagcaggcgctggggcaaacgctgggtttagttgtggcctatattctgtttgcggtcgccggggtatgtattattgccggagccagtattcactacggcgctgatacctggaacgtgctggatattgttcagcgttgggacagcctgttcgccagcttctttgcggtactggttattctgatgacaactatctccactaacgcgaccggtaatattattccagccggttatcagattgccgccattgcaccgacaaaactgacctataaaaacggcgtactgattgccagtattatcagcttgctgatctgcccgtggaaattaatggaaaatcaggacagcatttatcttttcctcgatattatcggcggaatgcttggtccggtaattggtgtcatgatggcgcattattttgtggtgatgcgcggacaaattaatcttgatgaactgtataccgcacctggcgattataaatattacgataacggttttaacctcactgcgtttagtgtaactctggtggccgttattttatctcttggcggtaagtttattcactttatggaaccgttaagccgtgttagttggtttgtcggcgtcatcgtcgcctttgcggcctacgccttattaaagaaacgtacaacagcagaaaaaacaggagagcaaaaaaccataggttaattaatcccgatattgaacattgagttaaaaaccaatctgtattttacaaggagtttgttatgtcttttgatttaatcattaaaaacggcaccgttattttagaaaacgaagctcgcgttgtagatatcgccgttaaaggcggaaaaattgctgctatcggtcaggatctgggcgatgcaaaagaagttatggatgcgtctggtctggtggttagcccgggcatggttgatgcgcacacccatatttctgaaccgggtcgtagccactgggaaggttatgaaaccggtactcgcgcagcggcaaaaggtggtatcaccaccatgatcgaaatgccgctcaaccagctgcctgcaacggttgaccgcgctagtattgaactgaagttcgatgccgctaaaggcaagctgactattgatgcggcacaactcggtggcctggtgtcttacaacatcgaccgtctgcatgagctggatgaagtgggcgttgtcggcttcaaatgcttcgttgcgacctgtggcgatcgcggtatcgacaacgacttccgtgatgtaaacgactggcagttcttcaaaggtgcgcagaagctgggcgaactgggtcagccggtgctggtgcactgcgaaaacgcgctgatttgtgacgaactgggcgaagaagcgaagcgtgaaggtcgcgtaaccgctcatgactatgtggctagccgtccggtatttaccgaagtggaagcaattcgccgcgtactgtatctggcgaaagttgctggttgccgtctgcacgtttgccacgtcagcagcccggaaggtgttgaggaagtgactcgtgcacgtcaggaaggtcaggacgttacttgtgaatcctgcccgcattactttgtactggataccgatcagttcgaagaaatcggtactctggcgaagtgtagtccgccgatccgcgatctggaaaaccagaaaggcatgtgggaaaaactgtttaacggtgaaatcgactgcctggtttccgaccactctccatgcccgccggaaatgaaagccggtaacatcatgaaagcatggggcggtatcgccggtctgcaaagctgcatggacgtgatgttcgatgaagcggtacagaaacgcggtatgtctctgccaatgttcggcaaattaatggcgactaacgcagcagatattttcggtctgcagcaaaaaggccgtatcgccccaggaaaagatgccgacttcgtcttcattcagccgaatagcagctatgttcttaccaatgacgatctggaatatcgccacaaagtcagcccgtatgttggccgtaccattggcgcgcgtatcacgaaaaccatcttacgtggtgatgtgatttacgacattgaacagggcttccctgttgcgccgaaaggtcaatttatccttaaacatcagcagtaatctggcccctgcaatgcccgtccttgcggcgggcattctccggttaaggtgtgtttatgttcaattttgcagtcagccgcgaaagcctgttaagtggatttcagtggtttttctttattttttgcaacacggttgtggttcctcctacgctactttctgcttttcagttgccgcaaagtagcctgcttacgctcacgcaatatgcttttcttgctaccgcactggcctgcttcgctcaggcgttttgcggtcatcgtcgcgctattatggaagggccaggtggcctgtggtggggaaccatccttactatcacccttggtgaagcaagccgcgggacaccgatcaacgatatcgccaccagcctggcagtggggattgcactctccggcgtgctgacgatgttgattggttttagcggattaggccatcgcctggcacggttatttacgccgagcgtgatggtcttgtttatgttgatgctgggcgcgcagctgaccactatctttttcaaaggtatgctcgggctgccgtttggcatagccgacccgaattttaaaattcagttaccgccgttcgcgctcagcgtggcggtgatgtgcctggtactggcgatgattatcttcctgccgcaacgttttgcccgttatggcctgctggtcggcaccataaccggctggttgttgtggtacttttgctttccttctagccacagcctctccggtgagttgcactggcagtggttcccgctcggcagtggcggtgctttgagcccgggaattattctgacggcggtgattacaggtctggtaaatatcagcaatacctacggtgcgattcggggcacggatgttttttatccgcagcagggcgcagggaatacgcgttatcgtcgtagctttgtggcgaccggatttatgacgctgataaccgtaccgctggcggtaattccatttagtccgtttgttagttccattggtttattaacccagactggcgattacacgcggcgtagctttatttatggcagcgttatttgcctgctggtggcgctggttcctgcactcacgcgactgttttgcagtatccctttacccgtgagtagtgcggtcatgctggtttcttatctgcctttactcttttccgcgctggtgtttagccagcaaataacgtttaccgctcgcaatatttatcgactcgcattgccgttatttgtcggcatatttttaatggcattaccgcctgtgtatctgcaagaccttccattaacgcttcgtcctctgctcagtaacggcttattggtcgggattttactggctgttcttatggataaccttattccgtgggaacgcatcgaataatttgttgaaaaaggattgataatgaagattgtcattgcgccagactcttttaaagagagcttaagtgcagaaaaatgttgtcaggcaattaaagccgggtttagcaccctctttcccgatgcgaactatatctgtttgccgatagcggatggcggcgaagggacggtggatgcgatggtcgccgcgacgggcggcaacatcgtgacgcttgaagtctgcgggccgatgggcgaaaaagtgaatgctttttatggccttaccggcgacgggaaaacggcggtgattgagatggcggcagcaagtggcctgatgctggtcgcgcctgaaaagcgtaatccgttgctggcctccagttttggtacgggggagttaattcgtcatgcgctggataacgacattcgccatattattctcggcattggcggcagtgcgacggtcgacggcggtatgggcatggcgcaggcgctcggtgtgcgtttccttgatgccgacggtcaggcgctggcggcaaacggtggtaatttagcgcgcgtggcaagcattgagatggatgaatgcgatccgcgtctggcgaattgccatattgaagtagcatgtgacgttgataacccgctggtaggggcacgcggcgcggcggcggtgtttggcccgcaaaaaggggcaacgccggagatggtcgaagaacttgaacaggggctgcaaaattacgcccgtgttttacaacagcaaactgaaattaatgtctgccagatggcgggcggcggcgctgcgggcggtatgggtattgcggcggcggtatttctcaatgcggatattaaaccgggcattgaaattgtgttgaatgcggtcaatcttgcgcaggcagtgcagggcgcagcactggtgattaccggggaagggcgcatcgacagccaaacggcaggcggtaaagcgccgctgggtgtggcgagcgtggcgaagcagtttaatgtaccggtgattgggattgctggcgtattgggtgatggcgtggaagtggtgcaccagtacggcattgacgcggtattcagcattttgcctcgtctggcacctttagccgaagtgctcgccagcggtgaaaccaatctcttcaacagcgcgcgaaatattgcctgcgccattaaaataggtcagggaattaaaaactaacccttacctttaaagcggatgcgatttatatcgcataagagtgcagtactcatgccggatgcggcatgagtaccatatccttcctgaaaatcgcgcaaattctatatattgcagagatcatgtaggcctgataagcgaagcgcatcaggcaatgttacaaaaaaagccacggtataaaccgtggcaaaatccaacatagctaaaaataatcaggcgagtggtatgacttaaatctctacgtcgcggttacaatctttgctgtaaatatagctgaacgcttcaccacgccctacaccataaccagcctgtaaagaataagcgcccataaagatgtaatcgccttttttcaccgggatccagttattgtcgaggttataaaccccctgaccggaaagaatataggcaccgtgttcctgaacgtgtgtttcgatataaccgtggctggcacctggtgcaaaagagaggatatgcatgttcatatcaaaacctaactctttgggcagaaaatccagcagaataacatcgtccatgccttcataatgaatgcgttccagttcgctggcattgccagaaaccagccacggtgcatagccttctaccggaacatagcggcgcttatataaaaagatttggctgtcttcggcctgggcgttaacaaacgtcattaaggagcctggcgggcaataaagatagccaccttcgcttaaggcaaatgttttgccttcggctttggcagtgatatttccagagatcacatacaggaacgtttcaatgccttcgccaccgaagccctgttggttgccaccgttttgatgcagtgtgaccagataatcaacaaaagaggcacccagctttggcgtggagaggattgtcgcgtcacaattttcaaagcccggaataatattttttaccagaccatccggggttaacagtgcgaaattaccgtgtttaacaatcgcacggttagccagtaaatcttcgcggtaaccggtgacgttatttaaatatcccatttatgactccttatttctgccaggcaagttgataaagcatgagtgccaacgttttgaccccttcggcaaggtcggtaatattggtgcgttccgccgggttatggctgatcccgttgatgctggggataaaaatcatgcaggttggtacgcgaggcgcgaaaatttgcgcgtcgtgcccggcaccactgtgcatcacccggtaattcagtttttctctttcacacaattctgtcagggtggcgaccagctccttattcatcggcacgggttcttcgtccatccataaatcgatatcaataccaatgtccatttcatcgcaaatcgcccgcatgtcgttttctaactgttgggtgaaatcgcgcagcacggcagcgtcggtatgacgacaatcaatggtgaacgtggttttacccggcaccacatttaccgtattcgggcgcggctctactttgccaaaggtcagaaccagcggatcgcccatccttttcgctttttcgacgctctgatggcaaatgcgactgaaagcgtaaactgtatcacgacgataacccatcggcgtggtgcctgcatggttactttcgccgttcagcgttaccgtataacgacgctgcccgacaattgcattcaccacgccaatactttgcccattactttccagcacacagccctgttcaatatgcagttcaacaaaggctttaatatcctgacgcggagttagtggggcgttcggaagagtaaatccgcaagccttcatcgcatcgacaaaactatttcctttggcatcacagatattccgcacgtcgtcaggattcgccagcccaaaaatatttttactgccccagaagacatacgggaagcggctgccttcttcttctgccatcgccaccacttcgaccgtacgtagcggcgcgccgtattgcgttttcagccagtcaattgccagccacgccgccagcgcgccgaattgcccgtcaaggttaccgccgttaaccacggtatcgatatggctaccgctcagaaccacttcctgtggatattcggtgccattcaggcgaccgtataaattccccacttcatcgaaacgtgtttccagcccgcttgctgccattctttttttaaattgctgctgggtttccagccattccgggctataaagtaaacgggtcatcccacccgctgggtcagcgccaaaagaggaaagccagggcagcgtttcttctatagcttgacggaaatgtgtaatcataagaaagtcctgtctcaataattattgcgcaaagggatttttcgtttcgtaactcgtgttataaagcgcgtcggaaattaaatactggtaaatatcatcaacaatttcgatgccttcgacggcggctttgcgttgtttaatatcctgatcctgtccgggataataaacctgattaaaaccgggcgcgggggtaatggcatttaattcgcgcatggtctggctaagatgttgacggaataattcgctggaggagaaaaagttcggattaataactatatgtaattgccccaaattacgccctgcgtgtaaatcgtcatacatgctactaacctgtcgcccgaacggtaagccgagtaagacgccactgaggacgtcaatcatcatcatcaggccatacccttttggcccggcggcggggagcagagcatgtaccgcgaacggatcggttgttggtacaccgtttttatcgaccgcccaggtatccgggatagacatattacggctgcgggcgtcgagcacttttccccatgcctgtacggtagtcgccatatcaaaggtaaggatctcgtcgccttctcccggcgcggcaaaggccagggggttagtaccgtagtaaatttccgcgccgccaaacggcaccaccattggatcggactggcacatgctaatgccaatgaatccggcgcgggctgcctgctgcacaaaataagagattgcgccgctgtgacccatccggctgataccgaccaccgcaacgccattttgctgggcggttttgatggcatgttccatacccattttcgccgcgacctgtccggcggcattgtcggcatgtaaaattgcgctgcacggcccggtttcctcaagacgaaactccggttcgcggttggtgccgcctttactaatgcgttccgcgtagtattccacgcgcaccgcgccatgagagtggatccctctggcatcggcgtaaaccaatacttcagccacggttgcagcgtgctcacgttttaacccagcctggcagagtttattctcaattagctggtggagtgtttcccgactgattttcatctgtcttcctttttaacgacggtgtgaagcatgactgcaattaacatacagggaaaatatctggattatgtgatccagacaggcaaaaaaatatagttagaatttatttgataatccgctcacttttaacctgatttttaaaacaacaacgcttattaaaaaataatgagtaatagcctggtggttatttgaattcttttgttaataattcctgtgtgatattcatcaccttatttactcgttgtcatcgataccgtaatcgccacattaacactgctcgtgcaattgccatgggtgcaatttttaaggagttgttatgatccacgcctttattaaaaaagggtgttttcaggatagcgtcagtttaatgattattagtcgaaaactcagcgaaagtgaaaatgttgatgatgtttccgtaatgatgggtacgcccgccaataaagcgttattagataccacaggtttctggcatgacgattttaataacgccacgccgaacgatatttgcgtggcaattcgtagcgaagcggcggatgcggggatcgcgcaggcgattatgcagcagcttgaagaggcgctaaaacaactggcgcaggggagtggcagcagccaggcgttgacgcaggtgcgtcgctgggacagtgcctgtcagaaattacccgatgccaatctggcgctgattagtgtggctggcgagtatgcggcggagctggcaaaccaggcgctggatcgcaacctcaacgtgatgatgttctccgataacgtcacgctggaagatgaaatccaacttaaaacccgcgcgcgggaaaaaggcttgctggtgatggggccggactgcggtacgagcatgattgccggcacaccgctggcttttgctaacgtgatgccggaaggcaatattggcgtcattggcgcttccggtaccgggattcaggagctgtgtagccagattgcgctggcaggggagggaattactcacgcgattggccttggcgggcgcgacctcagccgtgaagtgggcggcatcagtgcgctaacagcgctggaaatgctcagtgcagacgagaaaagcgaagtgctggcatttgttagtaaaccacctgccgaagctgtgcgtctgaaaattgttaatgccatgaaagcaaccggcaaaccgacggtggcgctgtttttaggttataccccggcggtggcccgcgacgagaatgtctggtttgcctccagcctggatgaggccgcacgcctggcttgcctgcttagtcgcgtcacggcgcgacgtaacgcaatagcgcctgtcagcagcggatttatttgcggtttgtataccggcggtacgctggctgccgaagcggcgggattacttgccggacaccttggcgtggaagccgacgatacccatcaacatggcatgatgctggacgccgatagccaccagattattgacctcggcgatgatttctacaccgtcgggcgtccccatccgatgatcgacccaaccttacgcaaccagttaattgccgatctcggcgctaaaccgcaagtgcgcgtgttgctgcttgatgtcgtgattggcttcggtgcgaccgccgatcctgccgccagcctggtgagcgcctggcaaaaagcctgtgccgcgcgtttagataatcaaccactgtatgccattgccacggtgacaggcactgaacgtgacccgcaatgccgcagccagcaaatcgccacgctggaagatgcggggattgcggtcgtgagtagcctaccggaagccaccttgctggcggcagcgttaattcatccgctcagccctgccgcacagcaacacacaccgagtttactggaaaacgtcgccgtgattaacatcggattacgcagctttgcgctggagctacaaagcgccagcaaaccggttgtgcattaccaatggagcccagtcgccggtggcaataaaaaactggctcgtttattagaacgtttgcaataaggggttcccatgtttacatcagtggcgcaagccaatgctgcggttatcgaacaaattcgtcgcgctcgtccacactggctggatgtgcaaccggcttcttcacttatcagcgaactaaacgagggcaaaacactgcttcacgccgggccgccaatgcgctggcaggagatgaccggacccatgaaaggggcgtgcgtgggcgcatgtctgttcgaaggttgggcgaaagatgaagcgcaggcgctggcaatactggagcagggggaagtgaacttcattccttgtcaccatgtgaatgccgtcgggccaatgggcggtattacttctgccagtatgccgatgctggtggttgagaacgtgaccgacggcaaccgggcgtactgcaacctcaacgaaggtatcggcaaagtgatgcgttttggcgcttacggcgaagatgtcctgactcgccatcgctggatgcgcgatgtgttaatgccagtattaagcgcggcgctggggcgcatggagcgcggtatcgatctcacggcgatgatggcgcagggcattacgatgggcgatgagttccatcaacgcaatattgcttcctctgcactgttaatgcgtgcgctggccccacaaattgctcgcctcgatcatgataaacagcacatcgccgaagtgatggatttcctcagcgtgaccgatcagttcttcctcaacctcgcgatggcttactgcaaggcggcgatggatgctggcgcgatgatccgcgcaggcagcatcgtcacggcaatgacccgcaacggcaatatgttcgggattcgggtaagcgggctgggcgaacgctggtttactgcgcctgtaaacactccgcaaggtctgtttttcaccggcttctcgcaggagcaggcgaacccggatatgggcgatagcgcgattaccgaaacctttggtatcggaggtgcggcaatgatcgcagcgcctggcgtaacgcgctttgtcggtgcgggtggcatggaagcggcaagagcggtatctgaagagatggcggaaatttaccttgaacgcaatatgcagttgcagatcccaagctgggattttcagggcgcgtgcctggggctggacattcgtcgcgtggtagaaaccggcattacgccactcatcaataccggtatcgcccataaagaggcggggatcgggcagattggcgcaggcaccgtgcgggcaccgctggcgtgctttgaacaggcgctggaagcactggctgaaagcatgggtattggttgaggaacgcgcaatgacgatcatccatcctctgcttgccagtagtagcgcaccgaattatcgccagtcctggcggttagcgggagtgtggcggcgggcgattaacctgatgacggaaagcggcgaactgttaacgttgcatcgtcagggtagtggtttcggccccggaggatgggtgcttcgccgtgcgcaattcgatgcgttatgcggtggattatgcggcaatgaacgaccacaggttgtggctcaagggattcgcctcgggcgtttcacggttaaacagccacagcgttattgtttgctgcgtattacgccgcctgcgcatcctcaaccacttgcagctgcatggatgcaacgcgcggaggaaaccgggcttttcgggccactggcgttggcggcaagcgatccgctgcctgctgagttacgccagtttcgtcactgttttcaggccgcgctcaatggcgttaagaccgactggcggcactggctgggtaaaggccccggattaacgccgagtcatgatgacacgctgagcggaatgctgctggcggcctggtattatggcgctttagatgcgcgctccggtcgtccgttttttgcctgttccgacaatctgcaactcgttaccacagcggtgagcgtcagttatttacgttatgccgcgcaaggatatttcgccagcccactcctgcactttgttcatgctctgagttgcccgaaacgtaccgctgttgcgattgatagcctgctggcgctggggcatacgagtggggcagatacgctgctggggttctggcttggccaacaattattacaaggaaaaccatgaaaacactggttgtggctcttgggggcaacgccttactccagcgcggtgaggcgctgacggcagaaaatcaatatcgcaatatcgccagtgctgtacccgcgctggcacgcctggcccgttcttatcggttggcgattgttcacggcaacgggccgcaggtggggctgctggcattgcagaatctggcgtggaaagaggtagaaccgtatccgctggatgtgctggttgcggaaagccaggggatgattggctatatgctggcgcagagtttgagcgcacagccgcagatgccgcccgtgacgacggtgctgacgcgcattgaggttagccctgatgatccggcgtttttgcagccagagaaatttattggtccggtttatcagccagaagaacaagaggcactggaagcggcttacggctggcagatgaaacgtgatggtaaatatttgcgccgggtggtggcgtctccgcaaccgcgtaaaattctcgacagcgaagccatcgagttgttgctcaaagaggggcatgtggtgatttgcagtggcggcggcggtgtgcctgtgacggatgacggagcagggagtgaagcagtgattgataaagatctcgccgctgcgttgctcgccgagcagattaatgcagatggactggtgatcctcaccgatgctgatgcggtatatgaaaactggggaacgccgcagcaacgtgccattcgccatgccacaccggatgagttagcgccatttgccaaagccgatggtagcatggggccgaatgtaacggcggtgagtggttatgtcagaagccgtggtaaacccgcgtggattggggcgttaagccgaattgaagagacgctggcgggcgaagcggggacctgtattagcctgtaatcgtaggcattagacatttgtgcctgatgcgacgcttgacgcgtcttatcaggcctacaaccggtgccgcatccggcaattggtgcacaatgcctgatgcgatgcttgacgcatcttatcaggcctacaatgggtaccggatcggtaggccggataaggcgtttacgccgcatccggcaagaatagagcaccagttaaccgaacttactctgcgcccaaatcacgccgctggcatattccggcggcagcagcgggattaaggcttccagcgtcgcagtcagacggcttgtgtcgctgtcggtcaaattcagatgccccactttacgccccggacggacttctttgtcgtaccagtgcagatgcaccagcggcagtttcagccagtcataattcacatcgctaccaatcagattgatcatcacgctcggattattcaccactggttgcggtaacggcagatcggtaatcgcccgcagatgcagctcaaactggctgatgctggcaccgttttgtgtccagtgaccgctgttatgcacacgcggtgccagttcgttgatcaacagaccttgcggggtgacaaaacactccatcgccatcacgcccacatagcccagctcctgcataatcgcgctcagcatctcttcggcttgcgcctgctgctgtgcgttggcctgcggaaaagcgacgctggtgcgcaaaataccgtcctgatgcaggttatgcgtcagcggataaaacacggtgctgccatcaaagccgcgcgcgccaaccaggctcacttcaccagagaagttaatgccctgctcgacaatacattcgccgtaacactctgccggtaactgttcggtttcatttgcgcgtaaacgccattgaccgcgaccgtcataaccaccagtgcgacgcttaacaatcgccagctcacctaaacgatcaaacaccgcaggccactcgctgcgttcggcaagtaactgccacggtgcagtcggcaggtggagcttatcgaaaagctgcttctgagtcagacggtcagcaataatcgggaacacatcgcggttcacaaaggccggatggcgcgccagctcgcgggttaatgcggtttccggccagcgttctatctcagcggtaatcacgctttgttgaaaaggcaccgccgccggttcagcgtccagcccgactggccagacagcaatgcctaacggttcgcctgcctgacgcagcatacggcctaactgcccgttaccgaggacgcaaacctgtttcatgccgcacctcgcgggtccgggttttccagcacttcgtcggtctgggctttgcgccagtcattcagacgctggtgcagttctttatcatgagtcgcaagaatttgtgctgccagtaacgccgcgtttgccgcgccagctttaccaatcgccagcgtacccaccggaatgccgcgcggcatttgtacgatggagtagaggctatcgacaccgctcagtgcggcgctctgtactggcacgcccagcaccggcaccagcgttttggcggcaatcatgcctggcagatgcgctgcgccgcctgcgcccgcaataatcacctgataaccgttctcttcggcgctttcggcgaagctgaacagtttatcgggggtgcggtgagcagaaaccacttcaacgtggtgcgggacattcaggatttcgaagatttcggcggcgaactgcatggtagcccagtcgcttttggaccccatcacgatggcgacacgcgccggattattgcgggaagacatgcgtcttaaaactcctgtggtgcacaactctcggctttagagggcacagagaatagcacggaaagagagcaaggaaaacggttgcgtggctgtgaaatcagcaaagttgcgggttttttaaaacggaaaatgaatcagctcaacgtcatccgccgtgactttcaccatactaccttccgtatgccaggcacccagtaccacgcgaaaagcaggttgctgattggcgataagttcatgcaccgccgggcgatgggtatgcccgtggatcagccattgcacctgatgtttttccatcgcactgaccaccgcgttttggttaacgtccatgatcgccaggcttttactgctgttggcttctttgctgttcgcgcgcattcgcgcggcaatgcgtttgcgcacaaacaacggcagggcgaggaatagcgtctgcagccagggtttgtggaccttggcgcgaaaagcctgataacccgcgtcatcggtgcacagcgtgtcgccatgcataatcaacacccggcgaccataaagttcgagcaccttttcttccggcaataacgtcatgccactttcacgggcaaagcgtttgccgagcagaaaatcacggttgccatgaatgaaataacagggaacgccggaatcggacaccgctttgatcgccgccgccatcttgcgatggagtgggttgggatcgtcgtcgccaatccatgcttcaaacagatcgccaagaatatacagcgcgtcggccttgcgggcttcccccgctaaaaaacgcagaaaaccggcggtgatcgccggttcttccacgcagagatgaagatctgcaataaagagtgtcgccacgattactcgctaacggtcacgctttcaatgataacgtcttcttttggcacgtcctggtgcataccgctacgaccggttgcaacacctttgattttgtctaccacgtccatgccgtcaaccacttcagcaaacacgcagtagccccaaccttgcaggctttcgccagagaagttcaggaagtcgttatcaaccacgttgatgaagaactgtgcagttgcagagtgcggagcctgagtacgtgccattgccagcgtaccacgggtatttttcaggccgttgttggcttcgtttttgatcggttctttggtggctttttgtttcatgcccggttcaaaaccgccgccctgaatcataaagccgttgataacacggtggaaaatggtgttgttgtaaaaaccttcgcggcagtagtccaggaagtttttaactgtttcaggtgctttatcgtcaaaagttttgatgacaatatcgccgtgattggtgtggaaagtaaccatttttgcatcctgttccgtttgattggtgcttcaacccagttcgggtcatatatagggtggtgttatagcataaccgcacgatcggatcatcacgcaatgtatgctgattcgcgcgggaaatatgggtattatacgcaactcaattacccacacatgtctaaacggaatcttcgatgctaaaaatcttcaatactctgacacgccaaaaagaggaatttaagcctattcacgccggggaagtcggcatgtacgtgtgtggaatcaccgtttacgatctctgtcatatcggtcacgggcgtacctttgttgcttttgacgtggttgcgcgctatctgcgtttcctcggctataaactgaagtatgtgcgcaacattaccgatatcgacgacaaaatcatcaaacgcgccaatgaaaatggcgaaagctttgtggcgatggtggatcgcatgatcgccgaaatgcacaaagattttgatgctttgaacattctgcgcccggatatggagccgcgcgcgacgcaccatatcgcagaaattattgaactcactgaacaactgatcgccaaaggtcacgcttatgtggcggacaacggcgacgtgatgttcgacgtcccgaccgatccaacttatggcgtgctgagccgtcaggatctcgaccagctgcaggcaggcgcgcgcgttgacgtggtcgacgacaaacgcaacccaatggacttcgttctgtggaagatgagcaaagagggcgaaccgagctggccgtctccgtggggcgcgggtcgtcctggctggcacattgaatgtagcgcaatgaactgcaagcagctgggtaaccactttgatatccacggcggcggtagtgacctgatgttcccgcaccacgaaaacgaaatcgcgcagtccacctgtgcccatgatggtcagtatgtgaactactggatgcacagcgggatggtgatggttgaccgcgagaagatgtccaaaagcctgggtaacttctttaccgtgcgcgatgtgctgaaatactacgacgcggaaaccgtgcgttacttcctgatgagcggccactatcgcagccagttgaactacagcgaagagaacctgaagcaggcgcgtgcggcgctggagcgtctctacactgcgctgcgcggcacagataaaaccgttgcgcctgccggtggcgaagcgtttgaagcgcgctttattgaagcgatggacgacgatttcaacaccccggaagcctattccgtactgtttgatatggcgcgtgaagtaaaccgtctgaaagcagaagatatggcagcggcgaatgcaatggcatctcacctgcgtaaactttccgctgtattgggcctgctggagcaagaaccggaagcgttcctgcaaagcggcgcgcaggcagacgacagcgaagtggctgagattgaagcgttaattcaacagcgtctggatgcccgtaaagcgaaagactgggcggcggcggatgcggcgcgtgatcgtcttaacgagatggggatcgtgctggaagatggcccgcaagggaccacctggcgtcgtaagtaattgcgctattgccggatgcgagttttcgcatccggttatcgtctgcgccaccacaacattcccatcagtagcatccccggcaaccacacccacatcaattcagaaataatcacctgatgcccgtacggcgtggtgtaacgagacaatgcaaacggcgcgacttttatcacctgccagggagcgaaaaagcgttcatcactccacggccacagccagccaacgcctttaccgccagtggttacgctatccagcaagctgtggcttagcaagctgacggttaaaaacagccagcagcgaatcagcccagccctgaaccatcggcgtccaataaacacacataacagcgggacaacaaacgcaaacaccaggctatgggtaaacccgcgatgaccaaaaacattgccgtaagcaacgccaaatttaaagctcaatacgtcggcgtcgggcagcatcgccaggatgattccggcaaataacagacgcggagggatgactttgctacccaaccctaaaccaatgcataggggaacggcggcgtgcgtaataacggttggcatgatggtcgcttcggcaaaatgtcgatgctatcagcatggatgaacggggcgtagagggcaaaagtctgaaaagagaaccggcctgttgatacaggccgggaaagggatcaggcaacaacctgtacgctgtgacctgcaaaactcactgtctgaccggcgacgattttgcagcgtttgcgcgtttcaaccgcaccgtcgactttcacctggccttcggcaatcgcgattttcgcctgcgcgccgctttcgctccagccttccagtttcagcaagtcgcacagctcaacgtgcggatgtttacctaaagaaaatgtcgccatgttactcatcctgtggatcatgatattcaacgcacgcctgtagcgtgttttcaatcagcgtggcaaccgtcatcgggccaacgccgccgggaacaggcgtaatgtaactggcgcgtttagccgcgtcttcaaacacgacgtcgcccacaactttgccattttccagacggttgatgccgacatcaatcacaattgcgccttctttgatccagtcaccgggaataaagcctggcttgccaacggcaacgatcaatagatcggcattttctacgtgatgacgcagatttttagtgaagcggtgagtcactgtagtggtgcaacctgccagcagcagttccatgctcatcgggcggccaacgatattgcttgcgccaatcaccacggcgttgaggccgaaggtatcaatgttgtaacgctcaagcagcgtgacgataccgcgcggggtgcagggacgcagacgcggcgcgcgctggcacagacgaccgacgttgtaaggatggaaaccgtccacgtctttgtccggatgaatacgttccagcactttgacgttatcaatacccgccggtaacggcagttgaaccagaatgccatcgatggtgttgtcggcattcagcgtatcgataagctccagcagctccgcttcgctggtggtttccgggaggtcataagagcgggagacgaacccgacttcttcacaagccttgcgtttgcttgcgacataaatttggcttgcagggttactacccaccagcacaacggccagtcctggtgcccgcagtccggctgcaatacgcgcctgaactttttgagcaacttcagagcgcacctgctgcgcaatcgttttaccgtcaataatctttgctgccatcagagagaggattccatctgttacgtagatcgaaggggatgcgcctattttgtcagaagcggggcgcgctgtcaggtttcgtttcagatttatcgcgtgaagcgacctcttgcgaaggtgaggcgcaccgtcgctgagactgaaagcttcatttttcgtccatgatggcgttgtaaatctggaactgatttatttccttgtctaaggattaagataatttaagaaatacctgacaatataaaaagaattttcagcctggtaatttaccgcttcaggtctatatttgtgttgaatatattttgcgcggaagtattcatctaacggggctctctattttttagaatagagtgcatattttcaattaagacattcttagaggataaaaaggaatttactactatcagtgtcttaaataaagtaatcggttatatacggatgtggagtcgataaatgagattgaaggaatatatatgaaattaagatttattagctctgcgctggctgccgcactattcgccgctacgggtagttatgctgccgttgtagatggcggtacaattcactttgaaggcgaactggtgaatgctgcctgtagtgtgaatactgacagcgcagaccaggttgtcacactcggtcaatatcgtaccgatattttcaatgctgttggtaatacctctgcattaattccattcaccattcagttgaacgactgcgatcctgttgttgccgctaatgctgccgttgcattttctggtcaggctgatgcaatcaatgataatttattggccattgcatccagtaccaatacaacaacagcaacgggtgtcggtattgaaatacttgataatacatccgcaattctcaaacctgatgggaatagcttcagtaccaaccagaacttgatccccgggaccaacgttcttcatttttctgcacgttataaaggcaccggtacaagtgcaagtgcagggcaagcaaatgctgacgcgacttttattatgagatatgaataatcaaaaccacgttgttttgaattatatatcacgtcttataacaaagtaatgtaccggttgtctgaagcggtatggtggcaatgtaaatcgaaatcatgttcactttgtatcatgccgctttattaaatgaaaagggaatgatgtgttgtaagaaaccaaagcaatcatttctttatattccttatttttgccgtcaggaatacacaaggcgtattaactatgatgactaaaataaagttattgatgctcattatattttatttaatcattagcgccagcgcccatgctgccggagggatcgcattaggtgccacgcgtattatttatcccgctgatgctaaacagactgcggtatggattagaaatagccataccaatgagcgctttctggtcaatagctggattgaaaacagcagcggtgtaaaagaaaagagtttcatcattacaccgccactgtttgttagtgaacccaaaagcgaaaatactttgcgtattatttacaccggtccaccgctggcagcagatcgtgagtctctgttctggatgaatgttaagacgatccctagcgtagataaaaatgcattgaacggcaggaatgttttgcaactggcgattttaagccgcatgaaattatttctccgtccaattcaattacaagaattacccgcagaagcgccggacacactcaagtttagccgatccggtaactatatcaatgttcataatccaagtcctttttatgtcaccctggttaacttacaagtgggcagccaaaagttggggaatgctatggctgcacccagagttaatagtcaaattcccttacccagtggagtgcagggaaagctgaaatttcagaccgttaatgattatggtagtgtaactccggtcagagaagtgaacttaaactaaccgaatcatctgacaatatcagagctaattatgaaaatacccactactacggatattccgcagaggtatacctggtgtctggccggaatttgttatagttctcttgccattttaccctcctttttaagctatgcggaaagttatttcaacccggcatttttattagagaatggcacatccgttgctgatttaagccgctttgagagaggtaatcatcaacctgcgggcgtgtatcgggtggatctctggcgtaatgatgagttcattggtagccaggatatcgtatttgaaagcacaacagaaaatacaggtgataaaagtggtgggttaatgccctgttttaaccaggtacttcttgaacgaattggccttaatagcagtgcatttcccgagttagcccagcagcaaaacaataaatgcatcaatttactgaaagctgtacctgatgccacaattaactttgattttgcagcgatgcgcctgaacatcactattcctcagatagcgttgttgagtagcgctcacggttacattccgcctgaagagtgggatgaaggtattcctgctttactcctgaattataatttcaccggtaacagaggtaatggtaacgatagctattttttagtgagctcagcgggattaatattggcccgtggcgtttacgcaacaatggttcctggaactattttcgcggaaatggatatcatagtgaacagtggaataatattggcacctgggtacagcgcgccattattccgctgaaaagtgaactggtaatgggagacggcaatacaggaagtgatattttcgatggcgttggatttcgtggtgtacggctttattcttctgataatatgtatcctgatagccagcaagggtttgccccaacggtacgtgggattgcccgtacggcggcccagctaacgattcggcaaaatggttttattatctatcaaagctatgtttcccccggcgcttttgaaattacagatttgcacccgacatctagtaatggcgatctggacgtcaccatcgacgagcgcgatggcaatcagcagaattacacaattccgtatagtacagtgccaattttacaacgcgaagggcgtttcaaatttgacctgacggcgggcgattttcgtagcggtaatagtcagcaaagtagccctttcttttttcagggtacggcactcggcggtttaccacaggaatttactgcctacggcgggacgcaattatctgccaattacaccgcctttttattagggctggggcgcaatctcgggaactggggcgcagtgagcctggatgtaacgcatgcgcgcagtcagttagccgacgccagtcgtcatgagggggattctattcgcttcctctatgcgaaaagcatgaacaccttcggcaccaattttcagttaatgggttaccgctatagcacacaaggtttttatacccttgatgatgttgcgtatcgtcgaatggaggggtacgaatatgattacgacggtgagcatcgcgatgaaccgataatcgtgaattaccacaatttacgctttagccgtaaagaccgtttgcagttaaatgttagtcaaagtcttaatgactttggcagcctttatatttctggtacccatcaaaaatactggaatactagcgatagtgatacgtggtatcaggtggggtataccagcagctgggttggcatcagttatagcctcagttttagctggaatgaatctgtagggatccccgataacgaacgtattgtcggacttaatgttagtgtgcctttcaatgttttgaccaaacgtcgctacacccgggaaaatgcgctcgaccgcgcttatgcctcctttaacgccaaccgtaacagcaacgggcaaaatagctggctggcaggtgtaggtgggaccttactggaaggccacaacctgagttatcacgtaagccagggtgataccagcaataatgggtacacgggcagcgccacggcaaactggcaggccgcttacggtacgctggggggcgggtataactacgaccgcgatcaacatgacgttaactggcagctgtctggcggtgtggtcgggcatgaaaatggcataacgctgagccagcctttaggggataccaatgttttgattaaagcgcctggcgcaggcggtgtacgcattgaaaatcaaactggcattttaaccgactggcgcggctatgcggtgatgctgtatgccacggtttatcggtataaccgtatcgcgcttgataccaatacgatggggaattccatcgatgttgaaaaaaatattagcagcgttgtgccgacgcaaggcgcgttggttcgtgccaattttgatacccgcataggcgtgcgggcgctcattaccgttacccagggcggaaaaccggtgccgtttggaagtctggtacgggaaaacagtaccggaataaccagtatggtgggtgatgacgggcaagtttatttaagtggtgcgccattgtctggtgaattactggttcagtggggagacggcgcgaacagtcgctgcattgcgcactatgtattgccgaagcaaagcttacagcaagccgtcactgttattagcgcagtttgcacacatcctggcagttaaaggaaattatcaataagataatctgcagattattattggcgatggcatgtttgtgtctggcaaacatatcctgggctactgtttgtgcaaatagtactggcgtagcagaagatgaacactatgatctcagtaatatctttaatagcaccaataaccagccagggcagattgttgttttaccggaaaaatccggctgggtaggtgtcagtgcaatttgtccacccggtacgctggtgaattatacataccgtagttatgtcaccaactttattgttcaggaaactatcgataattataaatatatgcaattacatgattatctattaggtgcgatgagtctggttgatagtgtgatggatattcagttccccccgcaaaattatattcggatgggaacagatcctaacgttagccaaaaccttccattcggggtgatggattctcgtttaatatttcgtttaaaggttattcgtccctttattaacatggtggagatccccagacaggtgatgtttaccgtgtatgtgacaagtacgccttacgatccgttggttacacctgtttataccattagttttggtggccgggttgaagtaccgcaaaactgcgaattaaatgccgggcagattgttgaatttgattttggtgatatcggcgcaagcttatttagtgcggcagggccgggtaatcgacctgctggtgtcatgccgcaaaccaagagcattgcggtcaaatgtacgaatgttgctgcgcaggcttatttaacaatgcgtctggaagccagtgccgtttctggtcaggcgatggtgagcgacaatcaggatttaggttttattgtcgccgatcagaacgatacgccgatcacgcctaacgatctcaatagcgttattcctttccgtctggatgcagctgcggcagccaatgtcacacttcgcgcctggcctatcagtattaccggtcaaaaaccgaccgaagggccgtttagcgcgctggggtatttacgcgtcgattatcaatgaggtacggagaatgagaagagtactctttagctgtttctgcgggctactgtggagttccagtggatgggcagttgaccctttaggaacgattaatatcaatttgcacggtaacgttgttgatttctcctgtaccgtaaacacagcggatattgataagacggtagatttaggcagatggcctacgatacaactactgaacgctggcgataccacggcactcgtcccttttagcctgcggctggagggatgtcctccgggtagtgttgcgattttatttacgggaacgccggcatccgataccaacctgctggctctggatgatcccgcaatggcacaaaccgtcgccatcgaattacgtaatagcgatcgctcccggctcgcactgggggaggcgagcccgactgaggaagtagatgcaaatggcaatgtcacactaaacttttttgccaattatcgagcgttagccagcggtgttcggccaggtgtggcgaaagcggatgcgatatttatgatcaattataattaatattatattaattcgtataatttggcgtagtcgataagctctacaatactatgcaaacctagcttgccataaatattagatttatgcgcactaactgttttattgctaagtaataacttatcggcaatttctttattagataatccgctaaccagataacgtaatatggtcacttcacgattagatagcacagtgaccgtactactattcgtactacatttattgctttttatatagttaagcgtttcgctgggaaaaaacgtgtatccggagaggatcatctgaacggcatgaaaaatatcattctgatcattgcatttactgacaaaaccgttagcaccagcttgtatcgctctgccagcataaaagcattcacttttgctacttaaaaataacactttcactgtgctctggatttgtttgatccttttcaggaaggtaaaaccgtctgttccgggcaagtctatatccataatgattaaatcaacaggacgggttcggagataatcgatggttatgcgataatcatccgttttcaggacaatctgcaattcactgtttttttgcaacagaacttcaatagacattctgatgataggatgagtatccataatgatcacgctcgttggtttcatagttaccagtctcataggagcggacaattttccgttaggtcgggaaattgtactttgatacatgaaaatacgggttttcttgattcagacgcgcagcggtgtgcgtttgtttgccgctatagcgaaataaatcagaaaatcagacgcggtcgttcacttgttcagcaaccagatcaaaagccattgactcagcaagggttgaccgtataattcacgcgattacaccgcattgcggtatcaacgcgcccttagctcagttggatagagcaacgaccttctaagtcgtgggccgcaggttcgaatcctgcagggcgcgccattacaattcaatcagttacgccttctttatatcctccataatttcagagtgggacatatttgggacattatcaccaaaaatgtcgtctattttcctcgcatgctctgtcaaatgattaggcgcaaggtgagcatacctacgaaccatttctatggactcccatccgcccatttcctgaagcactgataatgggacgcctgactgaatcagccagcttgcccaggtgtgtctgaggtcatggaaacggaaatcttcctcatttatgcccgtcttatccgtttccgctttgcccttcaccacatcactttttgtcgctgtttggcgagataattcaacggtgtcaggccgtaaaacgccttaaaaacagagataaagtagctcgtgctgctatagccacataattgcgccacctgagtgatatttttgttatccatcaataacatctgtacggcgtaacgcatacgacactctgtgacaatctggctatagctggtattttcgttttttaatttctttttgagcaggctggggcttaaacataggctactggcgacaattcgcagattccagtaatgctgaatatcgctttgaataatgcggcagacgctgtcgcggacgctgctgcgtaagatatacatcagtagggcaataaaccggctttgctcaagaaagttagacaatacggtaaaaagcaatgcgcgcgtcaactccgcttcgcagggtctgctgggttgctgcttgctgtggttggcggctagccggaacacttccggtgtacggctatgacaagcgataaccggggttgccagccggctccagggctttacacaggttaagttcttatttaaaaacaacagataatcgttgatgatgttacggttgatgtgggtgattaatacgtgatttaacgtactgagttcaatgacgttattgttgcacgcgaaggcggccaggtagtttttcggaagggtaaacgtagcatggttattgacgcttacctctacctctttttcggtcaggatcaccacgcaaggttcactgctgctcaattgcatttcgcactcctcagatatcagaaactccgctcaaaggatctatgcttcctgcatgagtgatcggcccgttcgccgataacgatcttctttctttagcacgctttttagcaattaatcttgatggaattctgatgagagcgaaagaggtaagccaggtcgtacccgacttacctggaggagatttaatactcgagaatgccgtgcgcgacgggcaaatagcgcagagagaaatagagagtgtctttaccgcaagaggaacgtttcgctaacaggctggcaatttctgcgtccggtttcggtttcgctgtaaaggttttgcctttgccggcgacaaaaagttcataaacaacgccgctggcaggggcgggactttggcaatcggcgctggcctgtaaataacgttcacgctgttcagcggtcagtttatccacgccgctgccatcctgtacccagacattaacgccggttgctttaacgtgttccagcagttggcgatagccatcggggctcatgtttccggcgaaaaaactactgatataaaccggttttgcactaacatcgctaatcagccgctgcgcgttgtttaaccatgttagcaaaggctgacgggcggcttcgctgcgccagttcaggtcgtcaatttccgcgctgatgtaccagccatccggcgttatgccaggcgcggcgctccataatctggcttgctggagatcggcagccagcaggcgattaagatagctttccagcgctgcggagctctgtttctggtgcataaaaaattccggatcggcgttcagcccgacaataagcttcagaccagcctgttgcgcagctgcggcccgcttaaacaataacgtgcgctgttctggctgggtaaatgcatcgccgtaacgggtccattgcaaaacaagggtatcgaagccttgcaaacgtaactgactcatcagcccctgccactgggtatcggtaacctgactatctcggttttgtggttgccagataatacctttcatcgcaaaggaaaaagggctgaccaaaagcagtgtcagcaatacgaaaatgaacttacgcatttaccagtgcactccaatggtgagaaacgcgttgttgcgctctccgttacgttgattaatcgccttaaaggtatgttgatactcgacgccgagactgactttgtgcggccaggcgtcgtagtgcgtctcgccggtccagatattccagcggaccccgactccgccaagctgcgcgccctgagtgcctttatcacgatagccgttgtcctgaacgtgagcgtaaggctcaatagtctgtccgttagctaccttctgatgccagctgacgcgataatctgccgtccacgcctgaatatcctggcggatatattgcgccgcatcgaggtacaggttttgggcaaaccagccactaccgttcgggtgccattcgtcgctgtatttgccgccattaaagaaactggcgctggcgcgcagcatggtatcggatgcgccattttggccgttcagcggcaactgctgttcgacggcgatgaaaaagatctgatcgcgcagcggcttccagcgcagaccggtgccggacatcggatttttcaccggcatcatcaccccgttttctccggtatcggcaaagacgcggctataaacactgagcaggtcgccttccagcagcatattgcgtccgatgcggtactcggcttccagttgtccgtagctacgatagcttttccctggcgctgcgccgccgacattattgttagcggtactcattgcgccggaacgcaagccgatggaagaatcgaaactgaacgtccagcggcgaccgacctcctcatgcaaacggcggaaattgaagcgttgttgattttgttctggggtcagtggggttatcagcgcctgattatcaatgtcatcaatcaccagccgggcgtagtgctgcgtcgcaggcatgtcatccagacgctggttcacgtaggccagttgtcggatcagtgccggatcgtccggaagccctttatgcgccggttcgagcatttcccggctctgtgcgatatcaccgctatcccacaaggcgtaaccaagcgctgcctgggtgttgctattattcggttccagttccagcgcggcgcgcaaatcactcaccgcggccgggacattatgacgttggcgataaattgtcgcccgcgcaacgtaagcgttggcagaaggcgcaatattgatactgcgcgtgagatcgttcagtgcgagttccggctgaccaggaatgtaacgttgcgcatgcagccaccagtagagggcattgcttcccagtccacgtttttctgcctgttgtagccagcgatcgcgagccgcaccatttcctgccgcctgggcggtattggcagcagcaagcagatcctcattgctcatgtcgtgaagactgattttctgccaggccgccagtgcggtggcgtagtcctcaacctgatacgcctgataggctaccgcacgatgttgccaggcgctcggttgtcgttgttcggcctgaagccatgcatacaacgccacaccgggtagcgtgtcccgataacactttgccagacggttccaggcggcggcatcgtaggaagggctcatatcgcccagcaagcgaactattgccgggcaattatctgcaatacccggcaactgactttgccactgacgttgctccgccagcggtaagggtttgcttaaaatcgccaccttcgccggcgttgccaggtaaggatgactttccagcagagacgccagtcgcgccattaaagtctggctgacacgcgcatcgccctggaaaggatagcgttgcagcaataaatcggcagcttcgcgactctgctcgttctgcatcagttgccaggttagttgatccaggcgggtaagatttgccggttcttgctgatacagcaatcgtgccagacgcagagcttcagccttgttacgggtcgccacgctgacagcataacgctcctcaagcatttcattggcggggagggtggcgagcagtttttgcgctgcgtcgtactgaccttcttttaacagcaccggtagcgtcgcgccaacaacatactggcggttgtcggcaaactgtaccgtataattcgccaacgcctgaacggggttagcgctgtatttagataacagatagagccaacttttctcttgtgcgtccgtggtaaatagtggcttattttcaatgagataatgctggaggcgtgctttttcgccacgataagccagcgcggtcgcgtaagtaatataactctgaggatcggtgaagatcccctgactttgcagtgccaggatccgatcgtccagctgcccggcaagaagcacgtcaaaccactgacggcgttctgccgcgcttaatgtgttctgctggcgtgcttcattgtatagcgtatctgcctgggaccattgtttcaggtagattgcccgttgcagcagatcggttcgcagcgtttttccttccgggcttgcagcaaacgtcgcatcgttcagttgcgctctggcgacaggtaactgtgccagccgcagggcattctgcccgacttcactgcgacaacgcagggtcggcgcagcatcgcacgctttttgctgggcaagcagttcttcaactgtcgtaacgcttttcacttcaaccggaatagccgccagactgcgctcaagtcgggcatctcctgggtgacgtttcagttgatcctcaagcaacagccgcgcccggtcatcatgaccaaaatggcgataggcttccgcaaggtataaagtcagcggaatattatccggcacctgctggtgtatatattcaaattcgcggatggcggttgcttcgtcgttatttttctgtgccttcagcgctttatcgagacggggataaataacaaaatggcgataatcgctcagccccagctcttctgcgctggtgccgatattgtctgcgagtgcgctggtactcaataaagacgtcagcagtaaaccagaccatccgatgacgcgattaaggttattctccttcattttcggactccagttgcgcaacctgttctgtgtttaaacctgctttgagtaatagactttgcatgctaacttgtaattcgcgttgaattgtcaggacgcgatccaacgtttcctggctgataacgccttcggtgaccaaaaacttgccgagcggcagagaactgcgttcatggcgcaataacaacacgttaattgcactacgattaatatgaccgagcgtggtcagtatttcggcgaacaggaactgatgcggcacatattgccgccagatttcaccggcctgctgttccgtgagccactgatgctgaaccgcattgtacaacattgcccgcggatcgtgaccgcgtcggcgtgcataccagtgacgtaaccctgtgacaatttgtccccgcagaacaatgacgtaacgcactttgcgtccgactttacgcgtcagggccgccaggctaaccgggtcaataccatcttcactgccgacaattaactcgtcattttccagacgcagcggcagtaccgcataatgcagcgccacggaggccggcatttcggcaatcaggctggaagggatctgccaggcatcgatggattcccacgccacgccgttttgctctgccagcgcctgtgccagctgctcggcgctaatcagcccctgcatcagcatactaccgcccaggcgtagaccttcgacgcgattacgcagtgctgtatcgagttgttcttcagtgatgacctgattttccagcagaatttgacctaacgggcgcaagctgcgggtatcgccagtcacgctggggaagtcatgcgttgttttatcccacgccacgcgacgtggatcgccgtgttgaagtacctgttttagcgcgcgccagttggccatgaagttaatcaggttgccccagaaaagacgcaggacggaaagcagcccctgcgtcaggccgtagtagccagtaacgaaaatcacccgctgcacgatgcggttaaccatcaaaccaaagtttagccacagcagggtcattaaccatgcgctgccgctgaaaatagaaaggaaatgccaggcatcgggccacaaactttcatacgccagcaacagcaaaagctggatcatcaccagcatcgcgaggaagctgacaaagttactgattgcccctttgcggtcgcgccagagaaagtagttcagcgtcaggctggaggtccatttatgggttttaaagccttggaaaacaatgccgatgatccagcgggatttttgtcgaaccgcagtgctaaaggtatcggggaaatattcgcgcacgcagatcatgttacttgtccgcgcgtgctgtaaaaatttacgctgctcgcgttctttggcttcgtccaccaccggaaaacggacaaaaatttccgtcatacctttttctttcaggcggaagccaatgtcgtaatcttcagtaagactctgcacgtcgaaagcaataccgtcaccgtcagctaacagtgcggtcacggcgcggcggctgaaacaggtgccgacgcctgcgctgggcacttgtccggcgagggcttcacgcaccggaacatctttgccatgcagctcactaaactcatcaatgtaagtcatgctggtgaagtgcgtccattcgcgttcgaacggatacaccgggatctgaatcagatctttacgctcgaccagatagttgaacagacgcaattccatcggactaatcacatcttcggcgtcatgcagaataaaaccagcaaaagcgaaattggcgctacgctcaaattgggtgatggcgtccagcacgttgttcagacagtcggctttgctggtggggccaggacgcgcgcagactaccttatgcacattcgggaagcgagcgcacacttcgtcaacatcacgctgagtatcggggtcgttggggtaggtgccaacaaagatatgatagttttcgtagtcgagcgtggtcgccgccagctcggccatattgccgatgacgcccgtttcattccacgccggaaccataatcgctaacggtttttcatctggtttatacagttcgcggtaactcattcgcgggtagcggcgataaacactcaacttgcgtttaatgcggcgtacccagtagacgacatcaataaaaaaatcgtccagcccgctgatgaacatgatgaccgctaacgttatcgcgattacttttaagccgtagagccaggtagcaaaaacatcaagaagccagtccacacaaaaaccttacattaacgctggttatgtttagggtggcgtatattaaggttttttatgaattgtgacagctttttaccattaataggtatgactattgcggcacgttatttttacactggttataaaagttgccgtttgctgaaggattaagcgggtaatgtgataacaaaccttgtcccccgcgcatcgctcgttaccgcaaccgtgcctttatgcgcgacaacaatgcttttcactatcgccaggccaataccgctaccttcaccttttcgctggcgggaggggtcaacgcgatagaaacggtcaaacaatcgcggtaagtgctcgggcgcaatgggcgtaccggggttttcgacgataacttgcaccaggtgatcgaccgtctgacagcgcactacaattgtctctccggttggcgtataacgcagggcgttgctaagcaggttgcttagcgcccgacgcagcatcagcggatcgcccgcgacctgacacttgtcgccaacaaaccgcaactccacgccgcgatcttccgctaacgcctcgaaaaaatcgaacactttgccgacttcatccgccaggttgagcattttcttttcggggattagctggttgttatcggcctgagcgagaaacagcatatcgctgaccattttcgccattcgcgtcagctcttcgagattagagtagagcacatcttccagctccttctggctgcggctctggctgagggcgatttcggtttgcgttatgagattcgtaattggtgtgcgaatttcgtgagcgatatccgcactgaaattggactggcgggtaaagacatcctcaatacgctcgatcatatggttgaagctcagtaccagctgttccagctcaatgggcacggtctgcgggtcgaggcgaacgtcgagatctttgctggtaatattctggatttgacggctgacgctgcggatcggcgcgtgacctttatgtaccgccaacagtacgataaagacgatcaggatgctgattacgcttgcggtcataataagtttattcatcaaatcatttatgtaatgaagatgaaaatcgatgctaagcgcgatgtagagcgtataaatcggtttgccgtccaccaacgggccaaccggcaagttaatcatccgccagttgctgtgttccatatgcccgtgaccgtggcctggcatcatcatcgtcgggccggaaaggagatacacctcgccaccctgagcgtctttatcgggtatggcgtcacgcgtaaactcgcggatatccggcgcaccgggggagtgatacaccgttttaccctgactatctgccagggaaatcaacacattggaataaccactgacgatatcttccagcgtcattaagcgtcgggcttgcgtttcgtcagggtgatttagtacccgttcaagggtggcgctaatctcttttaaatcattaatatcctgctcggcaaaatgaacttttacactgtggatcatgatccatgcaaaggcgaaaaacgccgcgatggtggccaggctgataaaaaaggtcaggcgggttgccaggctaaacgggcgctgaaatggcttactgaccatccggcacctcaagcatgtaacccacgccgcgcacggtctgaattagcttcggctcaaagtcgttgtcgattttgccgcgcagccgcttcaccgccacatcaatagcattggtatcgctgtcaaaattcatgtcccatacctggctggcgataaggctgcggggcagcacttcgccctgatggcgaaggaagaactccagcagagtaaactctttactggtcaaagtgatgcgcgtgccgctgcgggtgactttgcggctgacgagatcgaccatcaaatcggcaacctgaaactgactttcgataatcaccgccgccccgcgccgcagtaatgtgcgcacccgcgccagcagttcagcaaaagcgaatggcttcaccaggtagtcatctgcccccaactccagccccttgacgcgatgttcaatggtgccaagcgcggtaagcaacagaatcggcatccctttattggcggagcgtaacatgcgcacgatatcccagccgttcacgtccggcagcataatatcgaggattatcagatcataatcaccggtcatcgccagatggtagccattcagcccgttgtcggccaaatcgaccacaaaaccggcttcggttaaccctttggtcaagtattctccggttttcttttcatcttcgacaatcaacagtttcatatttcctccgcatgttgcccgggcaattctagagtagcgggatcagatggcaatcgcttattggcaaaatgacaattttgtcatttttctgtcaccggaaaatcagagcctggcgagtaaagttggcggcataaaatcaccagaaattatgagcctatgtctccttgtaaacttctgccattttgtgtggcccttgcgctaaccggttgtagtctggcaccggattatcagcgtccggcaatgcccgtgccgcagcagttcagtctcagccagaacggcctggttaacgcagcagataactatcagaacgcgggctggcgcaccttttttgttgataatcaggtgaagacgctgattagcgaggcgctggtgaataatcgggatttgcgcatggcgacgctgaaagtgcaggaggcacgggcgcaatatcgtctgaccgatgccgaccgctacccacagctcaatggcgagggcagcggcagctggagcggtaatcttaaagggaataccgccacgacacgggagtttagcaccggccttaacgccagctttgacctcgattttttcggtcgcttaaagaacatgagcgaagccgagcgacaaaattatttagccactgaggaagctcagcgcgcggtgcatattctgctggtttctaatgtcgcgcaaagctatttcaatcagcaactggcgtatgcgcaattgcaaatagccgaagaaacgctgcgtaattatcagcagagttatgcgtttgtcgaaaaacaactgttgacaggtagcagtaatgttctggcgctggaacaggctcgcggggtgatagaaagtacccgcagcgacatcgctaaacgtcagggggaactggcgcaggcgaataatgcattgcaactgttgctgggaagctacggcaagctgccgcaagcgcagacagtaaacagcgacagcctgcaaagcgttaaattaccggcgggattgagcagccaaatcttattgcagcgcccggatattatggaagctgaacacgcgttaatggcggctaatgccaatattggcgctgcacgcgcggcattttttccgtctataagcctgaccagcggaataagcaccgccagtagcgatctaagcagtttatttaacgccagcagcgggatgtggaattttatacccaaaattgagatccccatttttaatgccggacgcaaccaggccaatctggatatcgccgaaattcgccagcagcagagcgtggtgaattatgaacagaaaatccagaacgcctttaaagaagtggcagatgcgctggcattacgtcaaagcctgaacgatcaaattagcgcccagcagcgttatctggcaagcctgcaaattactttgcaacgggcgcgggcattatatcagcacggcgcagtaagttatctggaagtgctggatgccgagcgttctttatttgcaacccgacaaactttacttgatctgaattatgcccgtcaggttaacgaaatttctttgtataccgcacttggtggcggttgacagcaatatactcgtcatacttcaagttgcatgtgctgcgtctgcgttcgctcaccccagtcacttacttatgtaagctcctggggattcactcgcttgtcgccttcctgcaactcgaattatttagagtatgacttttaactccaggagagaataaatgaaaaaagcactgcaagtcgcaatgttcagtctgtttaccgttattggctttaatgcccaggctaacgaacatcatcatgaaaccatgagcgaagcacaaccacaggttattagcgccactggcgtggtaaagggtatcgatctggaaagcaaaaaaatcaccatccatcacgatccgattgctgccgtgaactggccggagatgaccatgcgctttaccatcaccccgcagacgaaaatgagtgaaattaaaaccggcgacaaagtggcgtttaattttgtccagcagggcaacctttctttattacaggatattaaagtcagccagtaacccaggtttaatgagatgaaaaaaatcgcgcttattatcggcagcatgatcgcgggcggtattatttctgcggcaggttttacctgggttgcaaaggcggaaccgcctgcagaaaaaacgagcaccgcagaacgtaaaatcttattctggtacgacccaatgtatcccaatacgcggttcgataaaccaggtaaaagcccgtttatggatatggatctggtgccgaaatatgccgatgaagagagttctgcgtctggtgtgcgcattgacccgactcagacgcagaatctgggggtgaaaacggctaccgtcacgcgcggaccgctgacttttgcccagagtttcccggcgaatgtcagttacaacgagtatcagtatgccattgtgcaggctcgcgctgccgggtttatcgacaaggtgtatccgcttaccgtgggcgataaagtacaaaagggcacaccgcttctcgacctgaccattcctgactgggtggaagcgcagagtgagtatttactgctgcgcgaaaccggcggtacggcgacccagactgaaggcattcttgagcggctgcgactggcgggaatgccggaggcggatattcgccgcctgatcgccacgcaaaaaatccagactcgctttacgctcaaagcgcccattgatggcgtgatcaccgcgtttgatctgcgcgcgggaatgaatatcgccaaagataacgtggtagcgaaaattcagggtatggacccggtgtgggtcactgctgcgatcccggagtctatcgcctggctggtgaaagatgccagccagtttaccctcaccgttccggcgcgaccggataaaacactcaccatccgcaaatggacgctgctacctggcgtggatgccgcgacccgcacgctgcagctgcgtctggaagtcgacaacgccgacgaggcgctaaaaccgggcatgaacgcctggttgcaactcaacaccgccagcgaaccgatgctgctcattccgagtcaagcgctgattgataccggcagcgaacagcgggtgattaccgttgatgccgacgggcgctttgtaccgaaacgcgttgctgttttccaggcaagccaaggcgtcaccgcattacgctctggtctggcggaaggtgaaaaggtggtttccagcggcctgttcctgattgattccgaagccaatatttctggcgcactggagcggatgcgctctgaaagtgcgacccatgcgcattgagggaataaccaatgattgaatggattattcgtcgcagcgtggcgaaccgttttttggtgctgatgggcgcgttgtttctgagcatctggggcacctggaccatcattaatacgccagtggatgcgctgccggatctctccgatgtgcaggttattattaaaaccagctatcccggtcaggcaccacaaatcgttgaaaatcaggtgacttatccgctaaccaccaccatgttgagcgtgcctggcgcgaagactgtgcgcggtttcagtcagtttggcgactcttatgtgtatgtcattttcgaagatggcaccgatccgtactgggcgcgtagccgggtgctggagtacctcaaccaggtacagggtaagctgcctgcgggagtcagcgccgagctggggccagatgccacgggtgttggctggatctatgaatatgcactggtggatcgcagcggtaagcacgatctggccgatttacgcagtttacaggactggtttctcaaatatgagctgaaaaccatccctgacgttgcggaagtggcgagcgtgggcggtgtggtgaaagagtatcaggtggttatcgatccccagcgcctggcgcagtatggcatcagtctcgccgaagtaaaaagcgcgctggatgctagtaaccaggaagcgggcggtagcagcatcgaactggcggaagcggaatatatggtgcgcgccagcggctatctgcaaacgctcgacgactttaatcacatcgctttaaaagccagtgaaaatggcgtgcccgtttatctgcgcgatgttgcgaaggtccagattggcccggagatgcgccggggcattgccgaactaaacggcgaaggcgaagtggcgggcggggtggtgatcctgcgatccggcaaaaacgcccgagaagtgatcgccgccgtgaaggacaaactggaaacgctgaaaagtagtctgccggaaggcgtggagatagttacaacatacgatcgcagccagctcattgaccgcgccatcgacaacctcagcggcaagttgctggaagagtttattgtggtggcggtagtctgtgcgctgtttctctggcatgtgcgcagcgcgctggtggcgattattagcttgccgctggggttgtgtattgcttttattgtcatgcacttccagggactgaatgccaatattatgagcttgggtggcattgcgattgccgtcggggcgatggtcgatgctgctatcgtcatgatcgagaatgcgcataaacggctggaagagtggcagcaccagcatcctgacgccacgctggataataaaacgcgctggcaggtgatcaccgatgcgtctgttgaagtggggccggcgctatttatcagtctgctgattatcacgttgagctttatcccgatcttcaccctggaagggcaggaagggcgtctgtttggcccgttggcgttcaccaaaacgtatgcgatggcgggtgcggcgctgctggcgatcgtagtgatcccgatcctgatgggctactggatccgtggcaaaattccgccggaaagcagtaacccgctcaatcgctttttgattcgtgtttatcatccgctgtcgctgaaagtactgcactggccgaaaaccacgctgctggtggcggcgcttagcgtgctgacggttctctggccgctcaataaagttggcggggaatttttaccgcagatcaatgaaggcgacttgttgtatatgccaagcacgctgccggggatttccgcagcagaggcggcgagtatgctgcaaaaaaccgacaagctaattatgagcgtacctgaagtggcgcgggtatttggcaaaaccgggaaagcggaaaccgccaccgattctgctccgctggagatggtagaaacgaccatccagcttaagccgcaggagcagtggcggccaggcatgacgatggacaaaatcattgaggaactggataacaccgtgcggctgccggggctggcgaatctgtgggtgccgccaattcgtaaccgtatcgatatgctcagtaccggcattaaaagccccatcggcattaaagtttccggcactgtgctggcggatatcgacgcgatggctgagcaaattgaagaagtagcgcgaacggtgccaggcgtagcttctgcgcttgccgagcggctggaaggtgggcgctatatcaacgttgagattaaccgtgaaaaagccgcacgttacggtatgacggtggcggatgtgcagttgtttgtgacttctgcggtgggcggggcgatggttggcgaaacggtggaagggattgcccgttatccaattaatctgcgttatccgcaaagctggcgcgatagtccgcaggcactgcgccagctgccgatcctgacgccgatgaagcagcaaatcaccctggcagacgtggccgacattaaagtctctaccggaccgagcatgctgaaaaccgagaatgcgcgcccgacgagctggatttatatcgatgcccgcgatcgtgacatggtgagcgtggttcacgatttgcaaaaagcgatagctgaaaaagtgcagttaaaaccgggcaccagcgtggcattctccgggcagttcgagctactggagcgcgccaaccataagcttaaactcatggtgccgatgacgttgatgattatcttcgtgctgttgtatctggcgttccgtcgggtgggcgaagcgttgctgattatcagcagcgtaccgtttgcgctggtgggcggcatctggttgctgtggtggatgggctttcatctttccgtggcgacgggcactggctttatcgccctcgccggggtcgccgccgaatttggcgtggtgatgctgatgtatttacgtcacgccatagaggccgtgccgagcttgaataatccacaaacattcagcgagcagaagctggatgaggcgttatatcacggcgcggtcctgcgcgtgcgcccgaaagcgatgacggtggcggtgattatcgccggtctgctgccgattctgtggggaacgggggctggtagtgaggtgatgagccggattgccgcgccgatgattggcggcatgatcaccgcacctttgctgagcctgtttattatcccggcggcgtataagctgatgtggctgcaccgacatcgggtacggaaataaaagcaggataccccgtttaaccgtgtggattgtgtcttgcgacgatgggcactaaatgttaaaaggtgcccctcaacaaaaaagacacacaggggaaaggcgtgaaaaacgcgagtaccgtaagcgaagatactgcgagcaatcaagagccgacgcttcatcgcggattacataaccgtcatattcaactgattgcgttgggtggcgcaattggtactggtctgtttcttggcattggcccggcgattcagatggcgggtccggctgtattgctgggctacggcgtcgccgggatcatcgctttcctgattatgcgccagcttggcgaaatggtggttgaggagccggtatccggtagttttgcccactttgcctataaatactggggaccgtttgcgggcttcctctctggctggaactactgggtaatgttcgtgctggtgggaatggcagagctgaccgctgcgggcatctatatgcagtactggttcccggatgttccaacgtggatttgggctgccgccttctttattatcatcaacgccgttaacctggtgaacgtgcgcttatatggcgaaaccgagttctggtttgcgttgattaaagtgctggcaatcatcggtatgatcggctttggcctgtggctgctgttttctggtcacggcggcgagaaagccagtatcgacaacctctggcgctacggtggtttcttcgccaccggctggaatgggctgattttgagcctggcggtaattatgttctccttcggcggtctggagctgattgggattactgccgctgaagcgcgcgatccggaaaaaagcattccaaaagcggtaaatcaggtggtgtatcgcatcctgctgttttacatcggtagtctggtggttttactggcgctctatccgtgggtggaagtgaaatccaacagtagcccgtttgtgatgattttccataatctcgacagcaacgtggtagcttctgcgctgaacttcgtcattctggtagcaagcctgagtgtgtataacagcggggtttactctaacagccgcatgctgtttggcctttctgtgcagggtaatgcgccgaagtttttgactcgcgtcagccgtcgcggtgtgccgattaacagcctgatgctttccggagcgatcactagcctggtggtgttaatcaactatctgctgccgcaaaaagcgtttggtctgctgatggcgctggtggtagcaacgctgctgttgaactggattatgatctgtctggcgcatctgcgttttcgtgcagcgatgcgacgtcaggggcgtgaaacacagtttaaggcgctgctctatccgttcggcaactatctctgcattgccttcctcggcatgattttgctgctgatgtgcacgatggatgatatgcgcttgagtgcgatcctgctgccggtgtggattgtattcctgtttatggcatttaaaacgctgcgtcggaaataaggcattcacgctacatccgacaaaacgatgtcaaccatccgaaaccgctctcatccattcgatgagagcggtttttttaattactgcttaaatgcacccgccagagagcgaatatcattgccggttggcgagtaatccccgcatatccggttgtcaggtcaggatggtaaggcacctgctttacactttcgcccgtggtcagtgatggctgcgggcgaatcgtaccagatgttgtcaattaatcgtgttggcacagcgttatgactatcttttcttttatctgccagtgcacagcaaacatctcattctcacgatgaatgatgacctgctgtttattccagctaattatctgatagtccagaaaacctgcatcagtttggatctcacttgccttaaatgcgctctctttggcggaaaatgccagtgtcagcgccagagaaaaggctaaaccgcagtctgcgagtcgctcgtgttccgctggtgtaataatgttgtctgtcaattctcttgcggtttgtacagaaaaaatttcttctatatcaatgccaatcggttgacgagataccacggctaatgccgtagtcccacagtggctaatactgccgtatacctccgcaggccagacaggttggcgtagctcgccgattgcgggcacacatttatagccatattcccgcaaagcataaacagcagcgatccgtccggctaaatgctctgttttacgtttacgtccagcgtgttgcagttgtgcgtagtgcggcagccagagtaaatcctgttcacaaaaattcgccggatcgaactcaacaaaatgcagcgtatgtccggcaaaggggagggaggtatgcgtagttttcatatcgaccatattcgagactgatgacaaacgcaaaactgcctgatgcgctacgcttatcaggcctacatggtcctgcaatatattgaattggcaagatttttgtaggccggataaggcgttcacgccgcatccggcatgaacgacgcgcactttgtcaacaatctgacgttagcatcagaagtgggtgtttacgctcatataccacgtacgtcccggctcgttataggtatacgccccggcaccggcgatatagttggcccctgccgaatcgcccgtggtctgggcattacccgcacgccacaaacgtttgtcgaacagattgtccacgccgccggtcagactgacattcttcgtcacatcccaggtcgcgctcaggccaacaatgctgtaaggactaatttctttggtttccggtccaaccgctggctgacctttatagttgtacttcttcggctgctgcttgccgtaccaggtgaaggtcgtttgcatgctcaaatcttcccgtgcctgccagctcagcgtactgttcaacgtatactccgggatgatgctcaaacggtcgcccgtggttttgttttcactcttcagcatataagtgatgttattggtccacatcaccgtttcgctaaccggtacgtttaagcttccttccagaccttcaaccaccgctttcggcacgttatcccactgatagagatcggtgccgactgcgttttgccctacagccacatagcccgcttcaatcttattgcgataatcgttacggaaccaggtgacgcccgccagccacccgtcgcgtttgaactccagaccaatctctttgttgatgctggtttctgctttcaggtcatcgttaccttgcagatagcagccgcccgcgctggcatagcaaccctgacctttactgtagagaatgtagttcgggttagtctggtacaggctcggcgctttataagcacgggcgatgcccattttcagcgtgaagtcatcgcctaaaccttggcttatgttcagcgccgggctccagttattgccgacaatactgtgatgatcgaaacgcagccccggcgttacgatggtgctgtcagtcagctccatgttgttttcggcaaacaggctgaaaatttctgctttactatacgggctacggtcggtggtactcacgccatcaatagcgccaccggtattcgttccggtcagtgcctgggtgttggaacttaagtccttcatccgttgctgattccactccgtacccagcgtcagcgtctggttaacgaggaaatcaatcggcaggttaacttcgctgtgcagcatcacgtcatcaagatcgatatcgacgaaatcctgtgtcgctttttcgttaaatttcccttcggtaccgcccgccagaccttccggaatacggctgttacgggtgtgttcgtactgcacccagttgctggtggtcacgccgttatcccagccaccgttccaggtcagcgcgtagttctggcgatacagacggttggtttcatcgccatatttgctgcgggtataggaatcggagttggtattctgggtgtcgcccgcatacaggttaccctggcggctgtaacctgcttccagttccaggctttgcaatggcgcgaaatcccagcgcaccacgccattaatatctttgttgattaccccttcgcgcccggctggtaacgtcgtggcatacgttccggcacgcgcggactgatggccctggttgatatcccacgcgtcagcctgggttttgtcgaggttgccatacaaacggaagctgaattcgtcgcccagcggaccggtcaggctaaagttagtgcgtttggtggcaccttcctctttatgttctggcgcattgaaatatgcgtcccaggagccgtgccactcgccgctgccttttttggtaatgatgttaaccacgccgcccgccgcgccgttgccataacgcgcagctgccggaccacgcagaacttcaatacgttcaatcatttcaggtggcacccaggaagtatcaccacgggtatcgcgctcgccacgccagccctgacgcacgctgttacggctgcttaccggcttgccgtcaatcaaaatcagcgtgttttccggacccataccgcgaatatcaatctgtcggttattcccacgctgaccactggtggagttaccggtcaggttaacgcctggcatggtacggatgatcttgctcacatcgcgggcaaccgggtttttgcggatttcatctgcggtgatggtgctaacgccaggcgcctgtaagttctgctcggcggcggtaacgacaatagtatcgtcatgactaacaggagtatcggtcggctcttgtgcctgcgctaccccataaatccccagattgaccaacaaggccagggaatgaatcttcttgttcattgttttattcctgcatttttgccacgaattgcaactgtcgggcatggtcgtcatcaacacgacgcatcccgctaccgcgaaaacctttgatcctgaaagacacgcagtgcagttggttaattaatgtccgcgcttcccacggcgcgccattacgctattgcaaatgcaaatagttatcaataatattatcaatatatttctgcaatcaatgaaaaattgcacagtaaacatggggttatggtgtgacggcgttaaaagtaggaagtgagagctggtggcagtcgaaacatggcccggaatggcagcgtctgaatgacgaaatgtttgaggtcactttctggtggcgtgatccccaaggttctgaagaatacagcacgataaagcgcgtatgggtctacatcactggtgtgaccgatcaccatcagaacagccagccccagagcatgcagcgaattgcaggcactaacgtctggcagtggacgacacaactcaatgccaactggcgcggcagctactgctttattcccaccgaacgcgatgacattttttctgtaccatcccccgatcgcctcgaattgcgcgaaggctggcgaaaactattaccccaggcgatagccgatccgctgaacctacaaagctggaaaggcgggcgagggcacgctgtttctgcactcgaaatgccgcaagcgcctctgcaaccgggatgggattgtccgcaagcgccagaaatacctgccaaagaaattatctggaaaagtgaacggttgaaaaagagtcggcgtgtatggatttttaccaccggcgatgcaacagcagaagaacgcccgctggcagttttgctcgatggcgaattttgggcgcaaagtatgcccgtctggccagtgctgactagcctgacccatcgtcagcaacttcctcccgccgtgtatgtgttgatcgacgctatcgacaccacgcaccgcgcccacgaactgccgtgtaatgcggatttctggctcgcagtacagcaagagttattacccctggtgaaagctattgccccttttagcgatcgtgccgatcgcaccgtggttgccgggcagagttttggtgggctttccgcgctgtatgccggactgcactggcctgaacgctttggctgtgtattaagccagagtggaagctactggtggccgcatcggggcgggcagcaagagggcgtgttacttgaaaagctaaaagctggtgaagttagcgccgaaggtctgcgcattgtgctggaagcgggtattcgcgagccgatgatcatgcgggccaatcaggcgctgtatgcgcaattacaccccataaaagaatccattttctggcgtcaggttgacggcggacatgatgcgctttgttggcgcggtggcttgatgcaggggctaatcgacctctggcaaccacttttccatgacaggagttgaatatggcattcagtaatcccttcgatgatccgcagggagcgttttacatattgcgcaatgcgcaggggtaattcagtctgtggccgcaacaatgcgtcttaccggcaggctgggacattgtgtgtcagccgcagagtcaggcgtcctgccagcagtggctggaagcccactggcgtactctgacaccgacgaattttacccagttgcagaaggcacaatgagccagcatttacctttggtcgccgcacagcccggcatctggatggcagaaaaactgagtgaattaccctccgcctggagcgtggcgcattacgttgagttaaccggagaggttgatagcccattactggcccgcgcggtggttgccggactagcgcaagcagatacgctgcggatgcgttttacggaagataacggcgaagtctggcagtgggtcgatgatgcgctgacgttcgaactgccagaaattatcgacctacgaaccaacattgatccgcacggtactgcgcaggcattaatgcaggcggatttgcaacaagatctgcgcgtcgatagcggtaaaccactggtctttcatcagctgatacaggtggcggataaccgctggtactggtatcagcgttatcaccatttgctggtcgatggctttagtttcccggccattacccgccagatcgccaatatttactgcacatggctgcgtggcgaaccaacgcctgctagcccatttacgcctttcgctgatgtagtggaagagtaccagcaataccgcgaaagcgaagcctggcagcgtgatgcggcattctgggcagaacagcgtcgtcaactgccgccgcccgcgagtctttctccggcacctttaccggggcgcagcgccagcgcagatattctgcgcctgaaactggaatttaccgacggggaattccgccagctggctacgcaacttagtggtgtgcagcgtaccgatttagcccttgcgctggcagccttgtggctggggcgattgtgcaatcgtatggactacgccgccggatttatctttatgcgtcgactgggcagcgcggcgctgacggctaccggacccgtgctcaacgttttgccgttgggtattcacattgcggcgcaagaaacgctgccggaactggcaacccgactggcagcacaactgaaaaaaatgcgtcgtcatcaacgttacgatgccgaacaaattgtccgtgacagcgggcgagcggcaggtgatgaaccgctgtttggtccggtactcaatatcaaggtatttgattaccaactggatattcctgatgttcaggcgcaaacccataccctggcaaccggtccggttaatgaccttgaactggccctgttcccggatgtacacggtgatttgagtattgagatcctcgccaataaacagcgttacgatgagctaacgttaatccagcatgctgaacgcctgaaaatgctgattgcccagttcgccgcggatccggcgctgttgtgcggcgatgtcgatattatgctgccaggtgagtatgcgcagctggcgcagctcaacgccactcaggttgagattccagaaaccacgcttagcgcgctggtggcagaacaagcggcaaaaacaccggatgctccggcgctggcagatgcgcgttacctgttcagctatcgggaaatgcgcgagcaggtggtggcgctggcgaatctgctgcgtgagcgcggcgttaaaccaggggacagcgtggcggtggcactaccgcgcagcgtctttttgaccctggcactccatgcgatagttgaagctggagcggcctggctaccgctggataccggctatccggacgatcgcctgaaaatgatgctggaagatgcgcgtccgagcctgttaattaccaccgacgatcaactgccgcgctttagcgatgttcccaatttaacaagcctttgctataacgccccgcttacaccgcagggcagtgcgccgctgcaacttagtcaaccgcatcacacggcttatatcatctttacctctggctccaccggcaggccgaaaggggtaatggtcgggcagacggctatcgtcaaccgcctgctttggatgcaaaatcattatccgcttacaggcgaagatgtcgttgcccaaaaaacgccgtgcagttttgatgtcagcgtgtgggagtttttctggccgtttatcgcaggggcaaaactggtgatggctgaaccggaagcgcaccgcgacccgctcgctatgcagcaattctttgccgaatatggcgtaacgaccacgcactttgtgccgagcatgctggcggcatttgttgccagcctgacgccgcaaaccgctcgccagagttgcgcgacgttgaaacaggttttctgtagtggtgaggccttaccggctgatttatgccgcgaatggcaacagttaactggcgcgccgttgcataatctatatggcccgacggaagcggcggtagatgtcagctggtatccggcttttggcgaggaactggcacaggtgcgcggcagcagtgtgccgattggttatccggtatggaatacgggtctgcgtattcttgatgcgatgatgcatccggtgccgccgggtgtggcgggtgatctctatctcactggcattcaactggcgcagggctatctcggacgccccgatctgaccgccagccgctttattgccgatccttttgccccaggtgaacggatgtaccgtaccggagacgttgcccgctggctggataacggcgcggtggagtacctcgggcgcagtgatgatcagctaaaaattcgcgggcagcgtatcgaactgggcgaaatcgatcgcgtgatgcaggcgctgccggatgtcgaacaagccgttacccacgcctgtgtgattaaccaggcggctgccaccggtggtgatgcgcgtcaattggtgggctatctggtgagccaaagcggcctgccgttggataccagcgcattgcaggcgcagcttcgtgaaacattgccaccacatatggtaccggtggttctgctgcaacttccacagttaccacttagcgccaacggcaagctggatcgcaaagccttaccgttgcctgaactgaaggcacaagcgccagggcgtgcgccgaaagcgggcagtgaaacgattatcgccgcggcattcagcagcttgctggggtgtgacgtgcaggatgccgatgctgatttcttcgcgcttggcggtcatagcctactggcaatgaaactggcagcgcagttaagtcggcaggttgcccgccaggtgacgccggggcaagtgatggtcgcgagtactgtcgccaaactggcaacgattattgatgctgaagaagacagcacccggcgtatgggattcgaaaccattctgccgttgcgtgaaggtaatggcccgacgctgttttgtttccatcctgcgtccggttttgcctggcagttcagcgtgctcagccgttatctcgatccacaatggagcattatcggcattcagagtccgcgccccaatggccccatgcagacggcggcaaacctggatgaagtctgcgaagcgcatctggcaacgttacttgaacaacaaccgcatggcccttattacctgctggggtattcccttggcggtacgctggcgcagggtattgcggcgcgactgcgtgcccgtggcgaacaggtggcatttcttggcttgctggatacctggccgccagaaacgcaaaactggcaggaaaaagaagctaatggtctggacccggaagtgctggcggagattaaccgcgaacgcgaggccttcctggcagcacagcagggaagtactagtacggagttgtttaccaccattgaaggcaactacgctgatgctgtgcgcctgctgacgactgctcatagcgtaccgtttgacggtaaagcgacgctgtttgttgctgaacgcacacttcaggaaggtatgagtcccgaacgcgcctggagcccgtggatagcggagctggatatctatcgtcaggattgtgcgcatgtggatattatctctccagggacgtttgaaaaaattgggccgattattcgcgcaacgctaaacaggtaaattaatattatttataaacccataattacagaaaataattatgggttttttatttgtttgatttataggtttgatgaatatttctcttaaatagagtgaatgttgcattcagtggaaggaatttacaaacttcagcttcggataattatcaccaactggtaaagtgagcgccgtggagatttccccctattggactcattttcaggttataccccatgagtagtctgaatattaaacagggaagtgacgctcattttcccgattatcctctggcgagccccagtaataatgaaattgatttacttaatctaatcagtgttttatggcgggccaaaaaaacggtcatggcggtcgtttttgcgtttgcctgcgcaggcttgctgatctctttcatcctgccgcaaaaatggaccagcgcggcggttgtcacgcctccagaacctgttcagtggcaagagttggagaaaagtttcactaagcttcgtgtgctggatctggatatcaaaattgatcgtacagaagcatttaacctgtttatcaagaagtttcagagcgttagcttgctggaagagtacctgcgtagtagtccttatgtgatggaccaattaaaagaggcgaaaatcgacgaactggatttgcatcgcgcaattgtcgcattgagcgaaaaaatgaaagcggttgatgacaatgccagtaagaaaaaagatgaaccgagtctgtatacctcctggacgctaagttttaccgcgccaaccagtgaagaggcgcagaccgttttgagcgggtatatcgattatatctctacgttggtggtgaaagagagcctagaaaacgtccgtaataaactggagatcaaaacccagtttgaaaaagaaaaactggctcaggatcgcattaaaacgaaaaatcaacttgatgcaaacattcagcgcctcaattatagtctcgacattgccaacgcggcaggaattaaaaagcccgtttacagtaatggtcaggccgttaaagatgaccccgatttttctatttctctcggtgcagacggtattgaacgcaaactggaaatagaaaaagcggtcactgacgttgcggaactgaacggtgaattacgtaatcggcagtatcttgtcgagcaattaacaaaagcacatgtcaacgatgtgaattttacgccgtttaaatatcagttaagcccgagtttgccagtgaaaaaagacggtccgggtaaggcgattattgtgatcctttccgcgttgatcggcgggatggtggcttgtggtggcgtgctgttgcgctatgcgatggcatccagaaaacaggatgccatgatggcagaccacttagtttaactatttgcggtactaggtgccgttcgtccgagcggcaccacaagcggcgttccggcaactggatcgtcaatgatcatgcagcgcagaccataaatgcgctcaatcagttcagcagtgacaatctccttcggcgctccctgagcaacaattttcccttcccgcaatgcaatcaaatggctggcgtaacgacaggcctgattaagatcgtgcagcaccgccgccagggtatagcctttttcgcggttcagttcgcttaacaactccagcaaatcaatctgatgactgatatccagccaggtcgtgggttcgtcgagcagcataattgccgtttcctgggccagcaccatcgcgatccacgctcgctggcgttgtccgccagaaagggtatccacgctttgatctgccagatgagttattcccgtggcctgcattgctttcgttaccgcttcttcatcctctttgcgccagcgggtaaacagcggttgatgcggataacgtccacgcgccaccagctcctgcacggtgatatcgcccggcgtggtagcattttgcgccaacagaccaatccggcgtgcaacctctttactggcgtaatgttgaatgtgctcgccatccagccagacatgcccatgagcaggcgtcatcaggcggcttaaggtacgcagtaacgtggatttaccgcagccatttggcccgataattgccgtgaagtgaccatcaggtatttctacagtcagattttccgcaacggtatatttgccatatcccagggttaactgttcgccgcgcaaacgggctacactttcggtcattttttgcgagactcctgaattaacaagacgataaggtaaataccgccgaggctgacggtaacgacgccaaccggaagttgatacggcataaacagttgttgggcgcagagatcggccgccagcagtaacagcgccccgcatagcgccgcctgggttagcccccagcgagcggtgccgctaatgcgtcgggcaatgtgcggtgcgactaaagcaataaaggaaatcggcccggcaagcgctgttgccgcagcggtaagcaccactgcaaccagcatcattaacagacggctacgttcgacgctgacgcccagcgcacacgcggtatcatcgcccatttccagcaagcgcatccggcgtaccagtaaggcggcggcaatgagcatcaatataatgatgggtgcggaagggctggtttttgcccacgtcaggccgttgaggcttccggcattccacaaacctgctgttagcgccgtttctaaagacgctttcagcaacagccaggtattaaaggccaccagcatggcgcgaacgccgataccgataataatcaaccgaaaggtgtcgatgccgttgcgccaggcgagcagccagaccagcaggctagtgacaatgccgcccaccattgcactcagcgcgatagccgtcaggtcctgaccaaacagcaccatcgccaccagcacgccgctccacgccccggtgttaaagcccattacgtcagggctgccgagcgggttacgcatcaggctctgaaaaatcgcgccactgacgcccagtgctgcgccaatcaacagcgccatcagcacgcgtggtaaacgccattcggtgaccaccatcgtcatactgcgcggcgcatcgcccatcagcgcggcgaatacctggctggtttccagcgtgacggcaccgctgcgtaatccccagatacctgcaaccacacaggcggaaaccagcagcaaacaggtgatgagtaatcggcgagagacgtaaatcatgcaccacctcgcgttttacgtcgcacgaggaagatcagcaccggtgcaccaataaacgcactgaccacagaaacgcgcagttcgccgggcacaatcacccgcccgatgatatcggcaaacagcagcagggcaggggtagcaagtagcgtgacgggcaggctccagcgatgatcggcacccaccagccaacgcgccatatgcggcatcatcaggccaataaaggcaatcgggccaactattgccgtcgcactaccacaaagcacggtaatcgccagcagaccaatcaactgtgtgcgcgccacgcgactgcccagcgccgtcgcggtgtcgctgccgaggctcaaactgttcagcgcgcgactcagtaatagcgcagttgctccggcgatcagcaccgggatcagcaccacttttaaggtatgtagattgcgaatatccaggctaccggcttgccagaaacgcaactgatcgtagacgtcaggattaagcagggcgatgccgctggtcagtccttccagcaccgccgccagcgccacgcccgccagggttaaacgcaccggacttaactgcccgccgccctgactgccggtaaaggcaacaatcaaactggccaccagcgccccggcgaaggccatcgccagttgttcctgcgcggaagagtaaccaaacagcgccgcacccagcacaatggcaaagctggctccggcgttcacgccaagcaagccggggtcggcaagtgggtttcgggtgagggtttgcattaacgccccggcaaggccaagcgcgccgcctgccagtaaaccggcaagggtacgcggcagccgcgcgtcgagcacgatggtgcagtcggcgctctggcaggtgccggagaaggcctccagcactacggaagcggggagactttttgccccaatgagcaggcttaatgccgtcgcgataatcagtaataacagcaatccgggcacggcaatggcgcgtgtcacggcaacagaaccagacatacgaacttccatgataatgaaattaattatcgttatcgatcttatttggatatgttagcatgtgcagcctaagaataggtatttaaaatatttgatggcaaggcattgtaatgaataaacaatcctggctgcttaacctcagcctgttgaaaacgcacccggcgtttcgcgcagtattcctcgctcgtttcatcagtattgtgtctctgggtttgctcggcgtcgcggtgccggtgcagatccagatgatgacacattccacctggcaggtggggcttagcgtgacgctgaccggcggcgcgatgtttgttggcctgatggtcggcggtgtgctggcggatcgctatgagcgcaaaaaagtgattttgctggcgcgcggcacctgtggcattggcttcattggactgtgccttaatgcactgctgccggagccgagtttgctggcaatctatttacttggtttatgggatggttttttcgcaagccttggcgttacggcgctattggcggcgacaccagcactggtagggcgtgaaaacttaatgcaggccggggcgatcaccatgttgaccgtgcgtctggggagcgtgattagccccatgattggcggtttattgctggcgaccggtggcgtagcctggaactacgggctggcggcggcgggcacgtttattaccttgctaccgttgttaagccttccggcgttgccaccgccaccgcagccgcgtgagcatccgttgaaaagtttactggcaggatttcgttttctgcttgccagcccgctggtgggcgggattgcgctgctgggtggtttattgacgatggcgagcgcggtgcgggtactgtatccggcgctggctgacaactggcagatgagtgcggcacagattggttttctctacgcggcgatcccgctcggcgcggctattggtgcgttaaccagcgggaagctggcacatagtgcgcgaccagggttattgatgctgctctccacgctgggaagcttcctcgccattggtctgtttggcctgatgccgatgtggattttaggcgtggtttgtctggcgctgttcggctggttgagtgcggtcagcagcttgctgcaatacacaatgctgcaaacgcaaaccccggaagcgatgttagggcggattaacggtttgtggacggcgcagaacgtgacgggcgatgccataggcgcggcgctgctgggtggtttgggcgcgatgatgacaccggttgcttccgcaagcgcgagcggttttggtttgttgattatcggcgtgttgttattgctggtgctggtggagttgcgacattttcgccagacgccgccgcaggtgacagcgtccgacagttaatgcttaaaacagcgccttaagcctatccagcacttgcatggcgctgtagtaatccagacggaacgtctcggttcccagcgcataaacctgcttgttttgtactgcaggcaggtgcgcgagcagcggattagcataaatagcatcggcatctttctgatcaccggcgaacaggaatagactctcgccatttaaccctgcagccagattttccccaccaagctgaatgatgtcatggcgtttaccctgactttggctggcatttaaccctgcgggtaacttcgccagcgtaaagccgagttgttccagcatctgcccttgtgcactttctggcgtccagagattggcactgtgtgcagcggcagtatagacaatggcagtgaccggctgcggcggtaatttgatttgctctttcgccgccgccagttgcttatcaaactgcgcaatccgctctgccgcttgtttctcatgcccggtaatttcgccaagttgcgttaacaggctctgccagcttttgtcgtcgtaattgatgattaatgtcggggcgatggtggaaagctgatcatacagtgccagcgcgctatccccgccggttgcgctaattaaaatcagatccggcatttgcgcggcaacggcttcggcgctcggttcgccgatatagagccgttgcagtttgcgttctttcgccaccttgctccactggcgtaaaaagccctggtcatccgcgacgcggttattcggcgtggtcgcgccgctggcgatcaccggagcatcaatcgccagcagactgccggtcagggtgacgctggtggaaacaatacgctgcggctggctttccagtgtatgtgtgccacggctgtcagtaatctgacgcggccagtcagcggcctgaactgcggctattccactaagcaaaagtcctgttaatagaagggcgttgcggtagagcggggcgagtctcacaaatcagcttcctgttattaataaggttaagggcgtaatgacaaattcgacaaagcgcacaatccgtcccctcgcccctttggggagagggttagggtgaggggaacagccagcactggtgcgaacattaaccctcaccccagccctcaccctggaagggagagggggcagaacggcgcaggacatcacattgcgcttatgcgaatccatcaataatgcttctcattttcattgtaaccacaaccagatgcaaccccgagttgcagattgcgttacctcaagagttgacatagtgcgcgtttgcttttaggttagcgaccgaaaatataaatgataatcattattaaagcctttatcattttgtggaggatgatatggatacgagtctggctgaggaagtacagcagaccatggcaacacttgcgcccaatcgctttttctttatgagcccgtaccgcagttttacgacgagtggatgtttcgcccgcttcgatgaaccggctgtgaacggggatagccccgacagtcccttccagcaaaaactcgccgcgctgtttgccgatgccaaagcgcagggcatcaaaaatccggtgatggtcggggcgattcccttcgatccacgtcagcctagcagcctgtatattcctgaatcctggcagagcttctcccgtcaggaaaaacaagcttccgcacgccgtttcacccgcagccagagcctgaatgtggtggaacgccaggcaattccggagcaaaccacgtttgaacagatggttgcccgcgccgccgcacttaccgccacgccgcaggtcgacaaagtggtgttgagtcggttgattgatatcaccactgacgccgccattgatagtggcgtattgctggaacggttgattgcgcaaaacccggttagttacaacttccatgttccgctggctgatggtggcgtcctgctgggggccagcccggaactgctgctacgtaaagacggcgagcgttttagctccattccgttagccggttccgcgcgtcgtcagccggatgaagtgctcgatcgcgaagcaggtaatcgtctgctggcgagtgaaaaagatcgccatgaacatgaactggtgactcaggcgatgaaagaggtactgcgcgaacgcagtagtgagttacacgttccttcttctccacagctgatcaccacgccgacgctgtggcatctcgcaactccctttgaaggtaaagcgaatagccaagaaaacgcactgactctggcctgtctgctgcatccgacccccgcgctgagcggtttcccgcatcaggccgcgacccaggttattgctgaactggaaccgttcgaccgcgaactgtttggcggcattgtgggttggtgtgacagcgaaggtaacggcgaatgggtggtgaccatccgctgcgcgaagctgcgggaaaatcaggtgcgtctgtttgccggagcggggattgtgcctgcgagcagtccgttgggtgagtggcgcgaaacaggcgtcaaactttctaccatgttgaacgtttttggattgcattaaggagcgaggatgagcattccattcacccgctggccggaagagtttgcccgtcgctatcgggaaaaaggctactggcaggatttgccgctgaccgacattctgacgcgacatgctgcgagtgacagcatcgcggttatcgacggcgagcgacagttgagttatcgggagctgaatcaggcggcggataacctcgcgtgtagtttacgccgtcagggcattaaacctggtgaaaccgcgctggtacaactgggtaacgtcgctgaattgtatattacctttttcgcgctgctgaaactgggcgttgcgccggtgctggcgttgttcagccatcagcgtagtgaactgaacgcctatgccagccagattgaacccgcattgctgattgccgatcgccaacatgcgctgtttagcggggatgatttcctcaatactttcgtcacagaacattcctccattcgcgtggtgcaactgctcaacgacagcggtgagcataacttgcaggatgcgattaaccatccggctgaggattttactgccacgccaagtcctgctgatgaagtggcctatttccagctttccggtggcaccaccggcacaccgaaactgatcccgcgcactcataacgactactactacagcgtgcgtcgtagcgtcgagatttgtcagttcacacaacagacacgctacctgtgcgcgatcccggcggctcataactacgccatgagtagcccaggaagcctgggcgtctttcttgccggaggaacggttgttctggcggccgatcccagcgccacgctctgtttcccattgattgaaaaacatcaggttaacgttaccgcgctggtgccacccgcagtcagcctgtggttgcaggcgctgatcgaaggcgaaagccgggcgcagcttgccagcctgaaactgttacaggtcggcggcgcacgtctttctgccacccttgcggcgcgtattcccgctgagattggctgtcagttgcagcaggtgtttggcatggcggaagggctggtgaactacacccgacttgatgatagcgcggagaaaattatccatacccagggttacccaatgtgtccggatgacgaagtatgggttgccgatgccgaaggaaatccactgccgcaaggggaagtcggacgcctgatgacgcgcgggccgtacaccttccgcggctattacaaaagtccacagcacaatgccagcgcctttgatgccaacggtttttactgttccggcgatctgatctctattgatccagagggttacatcaccgtgcaggggcgcgagaaagatcagattaaccgtggcggcgagaagatcgctgccgaagagatcgaaaacctgctgctgcgccacccggcggtgatctacgccgcactggtgagcatggaagatgagctgatgggcgaaaaaagctgcgcttatctggtggtaaaagagccgctgcgcgcggtgcaggtgcgtcgtttcctgcgtgaacagggtattgccgaatttaaattaccggatcgcgtggagtgtgtggatagtcttccgctgacggcggtcgggaaagtcgataaaaaacaattacgtcagtggctggcgagtcgcgcaagtgcctgaaggagagaacacgatggctattccaaaattacaggcttacgcactgccggagtctcacgatattccgcagaataaagttgactgggcctttgaaccgcaacgtgccgcgttgttaatccatgatatgcaggactattttgtcagcttctggggcgagaactgcccgatgatggagcaggtgatcgcgaatattgctgcgctgcgcgactactgcaaacagcacaatatcccggtttattacaccgcccagccgaaagagcagagcgatgaagatcgggcgctgttgaatgatatgtgggggccgggcctgacccgcagcccggaacagcaaaaggtggtggatcgcctgacgccagatgccgacgacacggtgctggtgaagtggcgctacagcgcgtttcatcgttctccgctggagcaaatgctgaaagagagtggacgtaaccagctgattattaccggggtatatgcccacattggctgtatgaccaccgcaaccgacgcatttatgcgcgatattaaaccgtttatggtggcggatgcgctggccgatttcagccgtgacgagcatttgatgagcctgaaatatgtggccggacgttctggccgggtggtgatgactgaagaattactgccagcacctatccccgccagcaaagcggcgctgcgtgaggtgatcctgccgttgctggacgagtccgatgaaccgttcgatgacgacaacctgatcgactacggtctggatagcgtgcgcatgatggcgctggcggcgcgctggcgcaaagtgcatggtgatatcgactttgtcatgctggcgaaaaacccgaccatcgacgcctggtggaagctactctcccgcgaggtgaaataatggatttcagcggtaaaaatgtctgggtaaccggcgcaggtaaaggtatcggctacgccacggcgctggcgtttgttgaggcgggagcgaaagttacaggttttgatcaagcgttcactcaggagcaatatccctttgcgaccgaagtgatggatgttgccgacgctgcgcaggtcgcgcaagtgtgtcagcgactgttagctgaaacggagcgactggacgcgctggtcaatgcggcgggaattttacgcatgggcgcgaccgatcagctcagtaaagaggactggcagcagacttttgcggttaacgtcggcggtgcgtttaacctgttccagcaaaccatgaaccagtttcgccgtcagcggggcggggcgattgtcactgtggcgtccgacgccgcgcacacgccgcgtattggcatgagtgcttatggcgcaagcaaagcggcgctgaaaagcctggcgttgagcgtcgggctggaactggcgggtagcggcgtgcgctgtaatgtggttagccctggctccaccgacaccgatatgcaacgcacgctgtgggtgagcgatgacgccgaagaacagcgtattcgcggctttggcgagcagtttaaactcggcattccgctggggaaaatcgcccgtccacaagagatcgccaacacgattttgttcctcgcctctgacctcgccagccatattaccctacaggatattgtggtcgatggcggcagtacgctgggggcataagcatgatctggaaacgccatttaacgctcgacgaactgaacgccaccagcgataacacaatggtggcgcatctgggaattgtgtatacccgtctgggcgatgatgtgctggaagccgaaatgccggttgatacccgtactcatcagccgttcggtttactacatggcggcgcgagcgcggcgctggcggaaacgctgggaagcatggccggatttatgatgacccgcgacggacagtgtgtggtaggcacagaacttaatgcaacacaccatcgcccggtgtctgagggaaaggtacgcggcgtctgccagccgctgcatcttggtcggcaaaatcagagctgggaaatcgtcgttttcgatgaacaggggcggcgttgctgcacttgtcggctgggtacggcagttttgggatgaacccgacagaattagatgagattgcaggaaaactcggttaacggagtgatcgagttaacattgttaagttaaatattggtttcaactccgatttacatggttgctgtgttgttaaattgtacaaagatgttatagaaacaaaatgtaacatctctatggacacgcacacggataacaactatgaacaaaagtgggaaatacctcgtctggacagtgctctctgtaatgggagcatttgctctgggatacattgctttaaatcgtggggaacagatcaacgcgctgtggattgtggtggcgagcgtctgtatctatctgatcgcttaccgtttttatgggctgtatatcgccaaaaatgtgctggcggttgacccgacgcgtatgacgccagcggtgcgccataacgacgggctggactatgtgccgacggacaagaaagtgctgttcggtcaccattttgcggccattgccggagcaggtccgctggtggggccggtactggcggcgcaaatgggctacctgccggggatgatctggctgctcgctggggtggttctcgccggtgcggtgcaggatttcatggtgctgtttgtttctacgcgccgtgacggtcgcagcctgggtgagctggtcaaagaagagatggggccaaccgccggggtgattgcgctggtggcctgctttatgatcatggtcattatccttgcagtgctggcgatgatcgtggtgaaagccctgactcatagcccgtggggaacatataccgttgcgttcaccattccgctggcgctgtttatggggatctacctgcgctatctgcgtccggggcgtattggcgaagtgagcgtcatcggtctggtattcctgattttcgccattatctctggcggctgggtggcagaaagtccgacctgggcaccgtactttgactttaccggcgtgcagttgacctggatgctggtgggttacggttttgtggcggcggtgctgccggtgtggttactgctggccccgcgtgactacctctctaccttcctgaaaatcgggactatcgtcggtctggcggtaggcattttgattatgcgcccgacgctgaccatgcctgcgctgaccaaatttgtcgatggcactggcccggtatggaccggtaacctgttcccgttcctgtttatcaccatcgcctgtggcgcggtgtctggcttccatgcgctgatctcttctgggaccacgccgaagatgctggcgaacgaagggcaggcgtgctttatcggctacggtgggatgttaatggaatccttcgtggcgattatggcgctggtttccgcctgtatcatcgatccgggcgtgtattttgccatgaacagcccgatggcggtgctggctccggcagggacggcggatgtggtcgcttctgccgcgcaggtggtgagtagctggggctttagcattacaccagatacgctaaaccagattgccagcgaagtgggtgaacagagcatcatttcccgtgcgggcggtgcgccgacgctggcggtggggatggcctacattctgcacggcgcgctgggcggcatgatggatgtggcgttctggtatcacttcgccattttgtttgaagcactgtttattctgacggcggtggatgcaggtacgcgtgctgcgcgctttatgttgcaggatctgctgggcgtggtgtctcctggcctgaagcggaccgatagtctgcctgctaacctgctggcaacagcgctgtgcgtactggcgtggggctacttcctccatcagggcgtggtcgatccgctgggcggcattaacactctgtggccgctgtttggtattgccaaccagatgctggcagggatggcgctgatgctctgtgccgtggtgttgttcaagatgaaacgtcaacgttacgcctgggtggcgctggtaccaacggcctggctgctgatttgtaccctgaccgcaggctggcagaaagcgtttagcccggatgcgaaagtcggcttcctggccattgctaataagttccaggcaatgatcgacagcggcaatattccgagccagtatactgagagtcagctggcgcaactggtgttcaacaaccgtctggatgccgggttaaccatcttctttatggtggtcgtggtggttctggcactgttcagcattaagacggcacttgcggcattgaaagatccgaagccaacggcgaaagaaacgccgtatgaaccaatgccggaaaatgtcgaggagatcgtggcgcaggcaaaaggcgcacactaaagtcagagtgagggggggatgttggcgaatgttggcttagtgcccagggttccctctcaccctaaccctctccccggtggggcgaggggactgaccgagcgcgttgatagcatttgtaggccggataaggcgttcacgccgcatccggcactctttcagcaacatggttagcggaggccaagatgtttgatagtctggcaaaagccggaaaatatttaggtcaggcggcgaagctgatgattggtatgcctgattacgacaactatgtcgaacatatgcgggttaaccatcccgatcaaacgccgatgacctacgaagagtttttccgtgagcggcaggacgcgcgctacggtggaaaaggcggcgcgcgctgctgctaaatttgtacgtcaggctttaaagctttccacttttttgaacgctgcacgcaacgtatctggtgtcagcgtgactggcaggtaatgaatggactccaccggacgcagggtgtgggcaatcactttgtcgatctccgcctgattattgatatccacttccagctccgccagtgtagtcggcagatgaaaacgctgatacgctccagttaattgcgccagcacatcatcctgacccagcaaggcgctttgcaccagaattccgtaggcgactttggtgccgtggagaaacttctcggtttgcggcagcacggtcagaccgttatgcacggcatgagctgccgccacacgcgtaaaacgatcgcccagaccaccaaccatcccaccaccagcaataatagcatccaccacatcgcaaaaactttgcgttaactgttgattttgctgatcgctcagcgcctgttcgctactgtttaacaagacgtcgcgaatggcttgcgcattattgatccccagtcgcacggttagcggcaacgtttctggttgcggagccagcaccaccgcttcataccatttcgccagcgtgtcaccgatccccgccagcagatattgttgcggtgcattgaggataatctccggttccaccagcaccataaaattggcgtcgtcgaaaatctcataatgcagcgcctgtccggcatcattataccagacggagagcggtgtccaggcggcgcaggtggcggcgatcgtcggaacggcaacaaacggcagaccgagacggcgggcgagggctttcgcggtgtcgagcagtgcaccgccaccgacgccaatcaccacgctgcggtcgtcaccggactcagccgccagttgttgtacatcgctttcgctgcaatgaccgcgaaacaaaatatgctttgcccctggcagtccaaacgctggcggaagtttggtttgcgccgcagcaatggcgcgtttgccgtagatccacaccgcgcgagaaagttgttcatcagtgaaaaaatcgtgcaggtgattgaaacttcctggatgactaaagtagttagccgggccgacgaccacgcggataggattgtgaggcatgttgtgttgtccttattgttttatttagacatctaaacgtcttgattgccaaatactagcatcgtgttatagtgccttcaacacgcaacttcgtcaggtacaataaaaatgacaaataaccctctgattccacaaagcaaacttccacaacttggcaccactattttcacccagatgagcgcgctggcgcagcaacaccaggcgattaacctgagccaaggctttcctgattttgatggtccgcgctatttacaggagcggctggcgcaccacgttgcacagggggcaaaccaatacgcgcccatgaccggcgtgcaggccttgcgcgaggcgattgctcagaaaacggaacgtttgtatggctatcaaccagatgccgatagcgatatcaccgtaacggcaggggcgacggaagcgttatacgcggcgattaccgcactggtgcgcaatggcgatgaagtgatttgttttgatcccagctatgacagttacgcccccgccatcgcgctttctgggggaatagtgaagcgtatggcactgcaaccaccgcattttcgcgttgactggcaggaatttgccgcattattaagcgagcgcaccagactggtgatcctcaacactccgcataaccccagtgcaactgtctggcagcaggctgatttcgccgctttgtggcaggcgatcgccgggcacgagatttttgtcattagcgatgaagtctacgagcacatcaactttagtcaacagggccatgccagtgtgctggcgcatccgcagctgcgtgagcgggcagtggcggtttctagttttggcaagacctatcatatgaccggctggaaagtgggttattgtgttgcgccagcgcccatcagcgccgaaattcgcaaggtacatcagtatctgacctttagcgtgaataccccggcacagctggcgcttgctgatatgctacgtgcagaacctgagcattatcttgcgttaccggacttttatcgccagaagcgcgatattctggtgaatgctttaaatgaaagccggctggagattttaccgtgtgaaggtacatactttttgctggtggattacagcgcggtttctaccctggatgatgttgagttttgccagtggctgacgcaggagcacggcgtagcggcgattccgctgagcgtgttttgcgccgatcccttcccacataaactgattcgtctctgttttgccaagaaggaaagcacgttgctggcagcagctgaacgcctgcgccagctttaattatttaaccgtccaggcgcgggaatattgacggtcggcaaacaactcttgcaggccgttaatttgcttcaggcgcagcacttcgtcgctgtccattcccagctctttgccaattttattatcgtcccatcccaactggctaagttcacggacgatttcgctcatggcggtgatttgatggcgtccacgagcgcgattatgacgaatagtcgcggcgatgcgttgattacgcgtaccttccagacaggtcaccggcaaataaccttttaagcgtaattttaaactactactgcctttaccaatttcatggcggtgaaaaccatccacgatttccatggcatttttatccgtatgtgtgaccacaatgggttgggtaaaaccatctatttcaatggatttttgcagcagttttttttcgggtggtgccacgttgtttgggttgtaatcattaggcataagttggctgtttttaacccacagaacgcaatccactggctcttcacgaaaggggctaacctgatggatcgccatgcggatttcattaatcgctttgatgcgatcatcttccggcaagctggcgagaaattgcgttaaatcctgcgttaatcgttgttgcatagtatcccccattcctgacgttttccttttatccgttcgttataacgctgatagttcttgctttttgtggggctaaaacttaatgcccgacaccagtaatcgttattgagtaaaactttgcatatccgccgccaggaggggatatctttcgcgccaatgtccccttgctgggtttgtggaacctcgatgccttttttctgataccagtgcaaataaatggcgattttattgcggtaatgctcagctgttttttccggcatgctattgagcagcaataatgcatattcttgccagtctaaatgttctggcttgaggattttccgatgcccatagaaatgattgtcatgtccggcgtaaatgccgccactttttaccccgctgactcgtgcgcacatagcagcccagcgatccggttcgataacgtgatagagccataatccttgtcgttgctccgggccaaaaggttcgcaaattcgcatatgacgcagaggaacgcctgcctgatacattaggttatacagtgggttgcagagactttgatgatttgcataccaggtccagatatcagccactttccagtcgtaaatggggtaaatgtaccagctatgaccgcctggtgcggccgtagtccagggtttatcgtcggcaaaacgttgtttatttaaactggcgatggcgacaaaacggttgtaggactcatccgcacggatgccgatcatcatcgccgccggacgtttttgactaaaccattcggcaaactcacgtacaaattgttcgaaggtcatgcctggctggtaaaagcagaaaaagtcagggtcggttatcgcatcttggggaggttgacgtacccattcgacatcaggttcccagcactgccattcgggttggtattgactaagggaattttgcgtcgtaagcgggagcgcaacccagtaaaactcttcgatgacatcggtgtacaactcgcgcagggactgaacatagttaatggtgcaagagaattgcgcctcccagtcgataaacaaaacgcagatttttttgcccatttgtcgggcaagttcggctgtcagatgcagcattaaaccagagtctttgccgccagaaaaactgacacaaacgcggggtagggtgttgagtgtccaggtaatacgctctcgtgcagcttccagaatattgagcggaagaggaattttataaatagacatctgaagacgctctctgaacgttacagggtgatcagtgagataagtctgttaattataaagtaaacactgtaaagcagagtgttttatttttcattcgcgctgtgaataaatagatgaaagttatagtagctgtctgtagttatatatcaaaaactctcatttagacggtcaataaatcgggagaacaccaaattatttaaagaagatttattataggaaatgtaaagctttatactaggtaacggatgttctagttttatctcttttaagttaagaaagtcacggtaggaattataaagttcataggggactattcccagtaaatctgtaactgcaatgctattaatgattgtcagcaaagaggaaccacgaaaactgattttgcgattcataaatctctcgtctatttccatttgaatatcatcaacccctgcacttttagatattaattgggtgaactcttctgccataatttgttcataagtgctattgtcagtaattcgtggatgcctattactacaaattagagtattgcgaatcgtatgcaatggcatgcaaatgacggaacggctgatcactggcatttgggtgatcaccagatcggctttgcggtgaaccaacagttcttcagcattctctgcactcatgaggatatcatggcactcaatctcgacagaggaatcttgccgtaggcagcggatcagcatactattattagagcaagaaatgagctgagggccgtagataataaagtttttctttagttcggacttattgactatattaattgtttgttcaaggcctctgagatttttctcaagatggtgatgcagatttaaccctgttgtcgtcggcgcgataccttttccactgcgaatgaataaagggtcattaaattgcgcacgtaagcgttgtaagctctggctcacggcacttggggtgatatatagactttcagcagctttgctaatgcttaaatgctggtaaatacactcaaatatgacaagaagatttaagtcgaactttttcaagtcgtagagattggccatacactactccggttatatttttcttccatgatatattcacttaatcaatgttttttgcgtatatatttttattgattatgtttttttgcttaactcaggattaagtttttctaaaatagcacagccacttagggcagagcgagcaattcatgcttttttaggatggttgaaaagcagggatatagttcaaccatccatgaattaccttttatttattccccataatgatattaagcgttttctgatcgggcaaccccacggcctgttgtagcgtattttccttactcatgtaatagatagccggcgtgacatttgcccccagatcgtccatcagtttctcattgtcacttaacactttcatttgctctgtacttacgtttgcaggcacgtttagcttaagcttgccaccagaggcttcatattgttgccaggtttttgcgggatctttggaggcaagaattgccgctgctgtcgccgggctttctggcttgataaccccaaccaacaatgttcttaattgcactttgccagaatctacccacgggcgcgcctgctgccagaactgtttacaatatgggcagaacggatcggcgaagacgtagacaatgaccggcgcatcttttttaccgtcgaggagccagtgggattgttccatccgttgccacatttcgcgtccggctggtgcgtaaatttctttttcgataagtgtgttactcaggttttcacctttctcgttgtacatgtaaccagagatagcgtgcttaccatctggagtcaggtagatggtgacgcccatatcctgacactttccgagataacctttcattcctccgggggcatcgaatgttttgatgattgtaatgccctgtttttcaatcgcttttactggagcaggaagttcctctgcgaaggcgattgcaggaagcagagccagtaaaagtatcttttttaacattaatttgtccttttcagtcagtgcaaaagtcgagtaaaaggcataacctatcactgtcataggtaagagcttagatcaggtgattgccctttgtttatgagggtgttgtaatccatgtcgttgttgcatttgtaagggcaacacctcagcctgcaggcaggcactgaagataccaaagggtagttcagattacacggtcacctggaaagggggccattttactttttatcgccgctggcggtgcaaagttcacaaagttgtcttacgaaggttgtaaggtaaaacttatcgatttgataatggaaacgcattagccgaatcggcaaaaattggttaccttacatctcatcgaaaacacggaggaagtatagatgtccttgattaacaccaaaattaaaccttttaaaaaccaggcattcaaaaacggcgaattcatcgaaatcaccgaaaaagataccgaaggccgctggagcgtcttcttcttctacccggctgactttactttcgtatgcccgaccgaactgggtgacgttgctgaccactacgaagaactgcagaaactgggcgtagacgtatacgcagtatctaccgatactcacttcacccacaaagcatggcacagcagctctgaaaccatcgctaaaatcaaatatgcgatgatcggcgacccgactggcgccctgacccgtaacttcgacaacatgcgtgaagatgaaggtctggctgaccgtgcgaccttcgttgttgacccgcagggtatcatccaggcaatcgaagttaccgctgaaggcattggccgtgacgcgtctgacctgctgcgtaaaatcaaagcagcacagtacgtagcttctcacccaggtgaagtttgcccggctaaatggaaagaaggtgaagcaactctggctccgtctctggacctggttggtaaaatctaaatttccttcgtctttcacgccatagcggcgttggcgtcgcccgctcaccccggtcacttacttgtgtaagctcccggggattcacaggctagccgccttgctctgacgcgaaatacttcggaaattcacctaattcttcgggtgctgcggcacccgattttcttccccgcaccatgatgcaagctgcatccaggtagccgcagaggccgcttgcatgatgatgtttaaagcccaggagataaacatgctcgacacaaatatgaaaactcaactcaaggcttaccttgagaaattgaccaagcctgttgagttaattgccacgctggatgacagcgctaaaagcgcagaaatcaaggaactgttggctgaaatcgcagaactgagtgacaaagtcacctttaaagaagataacagcttgccggtgcgtaagccgtctttcctgatcaccaacccaggttccaaccaggggccacgttttgcaggctccccgctgggccacgagttcaccagcctggtactggcgttgctgtggaccggtggtcatccgagcaaagaagcgcagtctctgctggagcagattcgccatattgacggtgattttgaattcgaaacctattacagcctctcttgccacaactgcccggacgtggtgcaggcgctgaacctgatgagcgtactgaacccgcgcatcaagcacactgcaattgacggcggcaccttccagaacgaaatcaccgatcgcaacgtgatgggcgttccggcagtgttcgtaaacgggaaagagtttggtcagggccgcatgacgttgactgaaatcgttgccaaaattgatactggcgcggaaaaacgtgcggcagaagagctgaacaagcgtgatgcttatgacgtattaatcgtcggttccggcccggcgggtgcagcggcagcaatttactccgcacgtaaaggcatccgtaccggtctgatgggcgaacgttttggtggtcagatcctcgataccgttgatatcgaaaactacatttctgtaccgaagactgaagggcagaagctggcaggcgcactgaaagttcacgttgatgaatacgacgttgatgtgatcgacagccagagcgccagcaaactgatcccagcagcagttgaaggtggtctgcatcagattgaaacagcttctggcgcggtactgaaagcacgcagcattatcgtggcgaccggtgcaaaatggcgcaacatgaacgttccgggcgaagatcagtatcgcaccaaaggcgtgacctactgcccgcactgcgacggcccgctgtttaaaggtaaacgcgtagcggttatcggcggcggtaactccggcgtggaagcggcaattgacctggcgggtatcgttgagcacgtaacgctgctggaatttgcgccagaaatgaaagccgaccaggttctgcaggacaaactgcgcagcctgaaaaacgtcgacattattctgaatgcgcaaaccacggaagtgaaaggcgacggcagcaaagtcgttggtctggaatatcgagatcgtgtcagcggcgatattcacaacatcgaactggccggtattttcgtccagattggtctgctgccgaacaccaactggctcgaaggcgcagtcgaacgtaaccgcatgggcgagattatcattgatgcgaaatgcgaaaccaacgtgaaaggcgtgttcgcagcgggtgactgtacgacggttccgtacaagcagatcatcatcgccactggcgaaggtgccaaagcctctctgagtgcttttgactacctgattcgcaccaaaactgcataagaagaagtaagattcacctgcaattgcttagccgccggggtcaaacctggcggcttttttatggcattaaaaagccccgccgggatggctccgggcagggcgggatacttattctggcaattaacgcacaaccagcaccggcagattggcgtggcggatcacgctgctggcgttagaacctaacagatgggtgctaatgcttgggttgcgagaaccaataactacaacatcagcccccagttcttctgccaactcattgacttcatcccgcacgctaccaaaacggacatgttgtttaatgcgggaaggatcgatggtgaagtggctgaccatcgtttgcagacgttcttgtgcttcatgttgcagatgctcttcaaaacgacgcacatcagcggcaaaacggtgcaggctcaggctggcactcccgggtagtacgtgaagtagatgaataactccgtcatcctgggcgaggaattcagcgtggcgaacagctttgtcgctcaattccatttcaaatacatcaactggcataatgattgtcttatacataaccctttctccctgttaatcatgaacaaatcattcgccatgattataatatttatccctgatatttgtctggttctttttccttacgaactgtttctgtgatgaatatattctcactgaacaccaggaattctcccaaaacctgtggtaccgcccgttttcccgctgtgatagctacccttaaagactgactcttttttgaactgtctctggaggttgcatgaaagcattgacttatcacggcccacatcacgttcaggtagaaaatgttcccgatccgggcgttgaacaggcagatgatattattctgcgtattacggcaacggcgatctgtggctctgacctccatctttatcgaggcaaaatacctcaggttaaacatggcgatatttttggtcatgaatttatgggggaagtagttgaaaccggaaaggacgtaaaaaatttgcaaaaaggcgaccgagtggtaattccgttcgtcattgcttgtggcgactgttttttctgtcgattgcaacaatatgccgcctgcgaaaataccaatgcgggtaaaggcgctgcgctcaataaaaaacagataccagctccagcggcattgtttggttatagtcacctgtatggcggcgttcctggtgggcaggcggaatatgtccgcgtccctaaagggaatgtggggccgtttaaagtaccgcctttgcttagtgatgataaagcgcttttcctttctgatattctgccaacggcatggcaggcagcaaaaaatgcgcagatccaacaaggtagtagcgttgcagtctatggtgctggtcctgtgggattgttgacaatcgcctgtgcacggttgctcggtgcggaacagatttttgttgttgatcatcatccctaccgcttgcatttcgccgccgaccgctacggcgcgatcccgattaattttgatgaagacagcgatccggcacagagtattattgaacaaacggcaggtcaccggggcgtggatgcagtaatagacgccgtcggttttgaagcgaaaggcagcaccacggaaacggtgctgactaacctgaaactggagggcagcagcggtaaagcgttgcgtcagtgtattgcggcggtcaggcgtggcggcattgttagcgtaccgggcgtctacgctggatttattcacggtttcctgtttggcgacgcctttgataaagggttgagctttaaaatgggacagacccacgttcacgcatggctgggagaattattaccgttaattgagaaaggattactgaaaccagaagaaattgttacccactatatgccgtttgaagaggccgcccggggatatgagattttcgaaaaacgtgaagaggagtgccgtaaggtgattctggtacccggtgcacaaagcgcagaggcggcgcagaaggcggttagtggtctggtgaatgcgatgccggggggaacaatatgatcgtcaggagtggttttcgaggtaaaggacagccatgacgataatcgccgccataatcagaaatcctatcaggatgtaaaatgcttctgccatggttattcccacaaacgaaacggaataattttgcagcaaaagtgaacagtgagaaccaggaaaaattgctgattttgcgtaaagaggatgcgagtgcatcctctgggcaaagcgagttatcgcttgtgcagatgggattaaagcaggtagtcgccagcagcttctggctggtattcgagttccagcacttcaaggtgggttgcaacgccgcccggaagttcccagtgaatggaatcgccaacgcgcagccccagcagtgcggcacctaccggagccataacggaaagctgagtattgctatcggtcatttttgccggatacaccagcgtgcgcacacgcacttcgccatcgctaagattgcggaatttaacccggctgttcattgtcaccacgtcgtgtggcatctcttctgggctacacatttgggcgcgatccaactctgcgtttaacgcgtcggcgattggcaaaccagcataggcgggttgctccagcagaatatcgatgcgttcggcatccaggtcgttaatgatgatagttggtctggacatttttactccatgtcgtcggtgctgcgagtgtcgcagataaacatacccaaaagaaaaccctcaccgtcaggcggcgagggtttaactcacatgatgatactgactgttgctcactctttgaagtgatttgcgtcacattcagggaattcctcaatgcagcgcattatgtataaatcttaatcgccttggtttatggaagacgaattagcgtgttttgtaaatcagatgattaataacccgctttatcaatcacaaaggttttgccacagttacctgggtgaggttgtggcaagaaactgtttgcagaaagcggagcgttgatggcgtcagctttgatgctgatctgaatttcagtcaaatacgcagggttaccctggcacgttagcttaactgctttcacgttctcttttccccagcttttggcaaaggcggcgtcaaagtcacggcggctcactgttttaccgtaattatccgcaaggaattttccggcttcgctctctttaatttcttgattcaggcgtaccatcgtaccgaagtatgcgtccggatcaaaaccaaagcaggcaccgtgtttggcatattcgtagcgttccaggcaggaacgtccgccagctcctggcatgacttcacttagtttagcggccgtttccagacttaatccggtttccgggctactacacattcggctggcgcgcgcttctggtagattcgggattgggcgagtagcgcaaccgaagcgcatccagcggcgttcatcaacaccacgggcagcaacgcttttaggcaatcctggccacagaccatgtacggtcagaaaatcagctttgttggtcgtttcggtttgcaggcgacattcatctcgttcgttacgatttcgatcgtgttgactctggcaaaatccggtttgccaggagagggccaggacatagcgatcaaaatcgccatactgttttgcctgcaacgctaaggcgttggcagaagagaagggaagcagagaaaccgcgagcaacgcggcgttacgccagaatgctttcataatgggtgtggaactcatacatacactgaatactatctattaaatcataaaaaagcccgccaggtgggcttacctggcgggcgtgatgatttattcagcgtttggcgaacgtattagttccacatggcgagaatcggccagccaaccaacagcaacatagagatgtaaatcaccccgaagattgcgccaagacgccagtaatctttacttttcacatagccacagccgtaaataatcaccccaggaccggttgcatacggcgtcagacagcccatgataccgatagacagcaccagcaggatacacagttgttccattggtacgcccggaatacctttaccgacggccagaataaccggcagcatggttgcggtgtgcgcagacaggctggcaaacaggtagtgtgcaaagtagaacaccagaaccagtacaatcaccgttgcgtttggactgaatccttccaggtgcgtactcatggtaccggcgaaccagtcaataaaaccagaacgagtcaggccgttagccatcacaaccagagttgccaggttgaccagtgtgttccatgcgctgttatagcgggtaatgtctttccaaggcacaacgtgcagggccagcattaggctaactgccagcagaccaaccgcagtagcattaatgacttcactgccaaatacccacaaacctaagctgagcaatacaaggccaatcagtgtccactctctgcgtgtcagcgcacccatggttttcagttcatcacccgcccaggttgccacttcttcactgtgtgtgatttccggtttgtacagcacgtaggaaagccacggcgcaatgataagcaagataaccccaaccggcaggaagcagaggaaccactgcaaccagctaatctggataccggcaattttgctgacgaactccagacccagcacgtttggtgccgcaccggtgacaaacatggagctactcagactggtactaatgaccatcatccacatcaaatagccgccaatacgacgcgcggacggatcgttcgggaaacttttaaacaacggcggcaggtttttaatgaccggaaaaaccgtacccccggtacgcgcggtgttggaaggtgtaaacggtgccagcagaatgtcgataatgacaatcgcataacccaacgtcagcgtgcgtttgcccatgaatttcaccaggaaaagggcaatgcgacgacctaacccggaaacttcataccctaatgcaaaaataaatgcgccaaataccagccataccgtggtgctggaaaaaccagccaggccccatttcagcgcctgtttttgcgcattaaacgctgggtcagctaattctttggcatcaaagagcaggtaattactgccaataacgcaaatagtaaccgcaataaaactgatcgctgttgccggaattggctcgaggatcatgccgacaatcattgccacaaacacagcgaagtaatgccatgcctgcggcggcataccgtcggggacagggataagaaacatgacacccatcaccaccagtggggccaatagtttccatatattatcttttgctaaagacatacgggttctccgaaaattaatatttccaaatttatcaagtgcttaaataattaaatctgtgctaaaaaccaggtaaggatcagtaggtcagcactgccgcctggactgagatttcgttcgatacactccctgtcgaactgccggagataatcgagatcggcgggggttcgaatgccccctttttgcaataatgtttgcgcctcgcgctgtagccagcgcaggcccccctcgccaccgcggcttgcaacgttggtatcgccgttgatcgccatcagtaggagcaaggtatcgagcaatgccagttcaggatctaacccctgatccagcagagtgaggtaatgcggcaaggcgtgattgatcaccagtggataacccgcttcggcttcaccgcgtgcgccggtaaggccaagctgttggtacaaccgttgacctgccgtcagttgactattattggtacgcagttcgcgatcggtcaggccacggcagaaacttgccgccgtagaacaaacggttgttggcgttaccggttggttgagttgaagcaaacggccaattgccgcacatagcagccctaaagaaaaaatgctgcctttatgcgtgtttacgcccgcagtggcgcggaacatatcaccttcgcaagccataccaattgggcgtaatccgtggagtaccgcttctggtgccatttccgcactacaggcaccaaattcaatgaaacggggtagccagccctgaatcgccagcgcgctgcggtggaaatcttccagcgccatatctttgtgcgcaccgcagttaatgcgatccacgaggcctggtttcggactcagattgacttcagtcagcatggcgcgccagcccagcagggcgtactcatcgattaaactcgtcgcaagctttgtggttttagtactcgttgcaggcatgctcatcgttcagcagtgcctccatgttatttagttgacgttgcaggcatcgacatcgttcagcagtgcctccatgcggttgagtaaatcggtcagttgatgggtttttccacgcgcgcagacggctgcgctttgttcgcacaacaggcagcggcgaggcggcagactatagtcgcggcgggagagaatttcgccttcgggcgtcaggacatcgatatcccataaccgcccgagaggatgactatgttcaagctcaatggtggcgagcttgaggtcgcgagccggggcggcaatgctcaacatgccctccggcccgctggcggaaaccagtgcagcctgctcctgaatttgccagccctgttttgcggctaaggcacgcaaggctgtcacgccatgattaaaaattcggcgtgtgacctcgctgtctttaatcggcccaggcgcaaccacggtaaaggagaccagtggaacaggatggcgcttgagccagacgtgttgccgtgcttgcctttcatcccggctgacgagcagctcgggaatacttaccgcatggtggctggcgagttcaggaagcaggtgcatggcttattccttcacctgatgcacaacatcgatcacgctgccatcgcggtaacgcacaacggcaacgacgcggtctgtgaattcaatcggctgtggttcaccggtcagcagacgcgcacgttcgcgcagccactcaatggaaaccactttaatgcccgcttcctgcagacgttctgccagttccggacgtgccgggttaactgcgataccgtggtctgtgaccagaatatcgacactggagcctggggtgatgcaggtcagtacgttatccaccagagtcggaatacgaccgcgtaccagcggcgcgacgatgatggaaagcgcagaggcaatcgcggtatcgcagtgaccaccggaagcaccacgcagtacgccgtcagagccggtcagcacgttaacgttgaactgggtgtcaatttccagcgcgctcagtaccaccacgtcgagacgatcaacgcttgcgcctttgctaccccagttagcgtactggttggcgctgatttcgatgtgattggggttacgggccaggctttgcgcagcatggctgtcaaagctctgcacatccagcagtttgcggatcagacctttttcgtgcaggtcaaccatcgtcgcggtaataccgccaagggcgaagtcggcgcgaatatcgcggctacgcattttgtcttccaggaaacgggttaccgccaggcttgcgccgccggtgccggtttgcatggagaaaccttctttgaagtagccagagttgacaatcacatccgcagcgctacgggcaataagcagttcgcgcgggttagtggtcatacgggtcgcgccagcgccgatttttgcagcatcgccaacgcggtcaactttgacgatcaaatcaacctgatcttgctcaatgcttgccggattatgcggataaggcagcagttcttcggtaagcatcacgacctgttttgcgttgtcggcatcaactattgcatagccgagggagccgcagcaggctttaccggtgtagccgttggcattaccgaattcatcacaggacgggacgccgaggaaagccacgtcgatattcagttcgccgctctgtaccagatgcacacgaccgccgtgagagtggatctgcaccggttctgccagcagaccacgggagatctcttccgccagtggaccacgcaggccggaggtataaatgcgggtaaccacgccctggcgaatgtgttctaccagcggcgcatggcaatcactcagggagctggacgccagggtcaggtttttaaagcccatcttcgcgatgacgtccatcaccatattgacggtcaggtcaccgccacggaaagcgtgatggaaggaaaccgtcatgccgtcctgtaaaccagagcgacgaatcgcttcttccaggttggcgcacagtttgcgatcgcgcgctttttcagcctggtaggtttgctttgggctgttctggaaagcggcaagatcgcattcagcgcgacgattccaggccgctacccgttcttgtcgttgagattgttcaattttctgcgtcattttgattgccttattcttcgcggatgccggaaagttctgcacgggagagcaccagacgggcgcgatcgataaccggaccgtccaccatcttgccgttcagggaaaccacgccgaggccttcgcgagcggcggcttcagcggcttctacgacgcggcgggcgtgatccacttctttctgggtcggtgcgtagaggttgtgcagcagatcaatctgacgcgggttgatcaggcttttgccgtcaaagcccagctgtttgatgtgggcggcttcttgcagaaatccggcttcgttgttagcgtcggaatagacggtatcgaacgcctgaatacccgcagagcgcgcggcctgcaaaatggaacagcgtgcgaacagcagttcagttccttccggggagcgttctgtacgcaggttgcgcacatagtcttctgcaccgagggcgataccgatcaaacgctcggaagcgtgagcgatttccactgcgcgggtaatccccagcggagattcaatcgccgccagcaggccggtgctgccgggttcacgaccacaggctttttcgatacgcaggatctctttttcaatatccagaacatcctgagcggtatcggttttcggcagacgcacaacgtccgcaccaccgcgaacgacggcttccaggtcgttaacaccccattcggaatccagcgcgttgacacgcacaatggtttcaatatcgcgatacagcggatgttgcagcgcgtggtaaaccatgcggcgggcggtgtctttttcacgcaatgctacggagtcttcgaggtcaaacatcagggcatcagccgggtagatgaaggagttgctgaccatcgcggcattggcaccaggcacaaacaacatgctgcggcgggtgcgagttttacgttgttgcaggctagcggaaatcattggcaatcctcccatggcagagccgggataccgctggcgcgtgccagcagggcttccagtcgtgcacgtaaaatgcagtacagtgcgcctttgtcatcgacattcagctgtacgccgcgcacgttgtagcgggcgagaacgtccagaatggtggtgcgaattgcatcgccaaactgtttctcaacgctgctattgatttgcaggtcgatatcctgcgtatcgagtggggcgatgcgtatcatcacatccccagactcaagggtgcctgcaacggcgggctggtttattttcatttttcacctgtttctcatgcgggggtcttttgacgagctgccgcgtcctggcgggagtgctcaagcaggttctgcaaataatgcagcgtgactgcagggaccagcggcgcgatagccgtgagatcgtttttcgccagcagttgacgtacccgggaagcggatatcggcatctcctggtaacgcagccgctcaatttcaaccagttcgatgggcggtgcggagatagtcggcgtttccagccagtagcgcatatcctggttgtactgggcggtaacgcgacaaaagggttcagtaccgacaaagcggtgagttacacccagcgcgggagcgaggtactgacggaaaatcttcagatcaatttcggtgtaacaatggttaatgacgctctgttctttaatgaagtagcaagggaacgtagcgcgggagatgatgtattcggagccacgatgcacagtcaggcgtggaatatcggcggtgccttttaacaccaaatccagccggtcttcataggggaagcgactagaatcttctttgactaaaaacagatgcaaccagtcgcactgtgccgcagcctgttgaatcagataacggtgaccattcgtaaagggattggcgttcatcacaatgcagccaatcttgttccctggatgacgaaattttttcaggctttcggcatagcgtttcagtcgcgtggcgctgttttccatcagcaccatcacgccgggtacgctggtcagcgtggaaaaaccgcactggcggaacagcgcctcgtattcggttttggtataaataaacagatgcgtgctgtgccgctcataggcgaggtttatcaattcagtggctaatgtcagcgccagtccttcaccgcggacggattcactgatagcaacgcatttaataatatttccggcaattccaccgcacgcgataagcttttcatcgcgggttacggtaataaatacttcgactgtggtgtcaacgctcaaatcattttcatgcaggaattgggcgatttccgccatttttttattttcactacgttttacgcgggtgaaaatatcattgccgaacataataaatagtatcctgaaggtgcatgttgttatcgatttgcaacgaatgttgttcaatgttgcaaactgataaccttttattttcacttgggagaaagggggtgatcgaggtatatctttttctcctttcgctatacatcctaaggagtatttcggcgtgaaattttgatttatttcacatagagttagtggttttttatttatttaatgattttaagttttttaattaatgtaattacgaaatgactcgcaggtttaagtgatttaattgatttaatgaataaaatttgccacgatcataattaatatctatgtattttgattcaacattttaattacatccgtcaaagaggctcgggacaacccgcaaggaaaacaatgttgcagcttaacgagaataaacagtttgcatttttccaaagactggcatttccgctgcgtatctttttgctgattctggtgttcagtatatttgtcattgcagccctggcgcaatattttacggccagttttgaggactatttaacgcttcatgtacgcgacatggcaatgaatcaggcgaaaattattgcctccaatgacagtgtcatctctgcggtgaaaacgcgtgactacaaacggctggcgaccatcgctaacaaattacaaagagataccgattttgattatgtggtgattggggaccggcacagcatccgcctttaccatcctaatccggagaaaattggttatcctatgcagttcaccaaacagggcgcgctggagaaaggggagagctacttcattaccgggaaagggagtatggggatggcgatgcgcgccaaaacgccaatctttgatgacgatggaaaagtcatcggcgtggtgagcattggctacctggtgagtaaaatcgatagctggcgggctgagtttttattaccgatggcaggtgtgtttgtcgtgctgttagggattctgatgttgctgagctggttcctggccgcgcatatccgtcggcagatgatgggcatggagccaaagcaaatcgcacgcgtggtccgtcagcaagaggcgctgtttagtagcgtttatgaagggctgattgcggtggatccgcatggttacattaccgccatcaatcgtaacgcaagaaagatgctggggctgagttcccccggacggcaatggttgggtaaacccattgttgaagtggtcaggcccgccgatttctttaccgaacagattgatgaaaaacgtcaggatgtggtggcgaactttaacggtctgagcgttattgccaaccgggaagctattcgtagtggtgatgatttgctgggggccattatcagctttcgtagtaaagacgaaatttccaccctcaatgcgcaactgacgcaaataaaacaatacgttgagagccttcgtacattgcgacacgagcatctcaattggatgagcacgctcaatggtctgttgcagatgaaagagtatgatcgcgtgctggcgatggtgcagggggagtctcaggcccagcaacagcttattgacagcctgcgcgaggcgtttgccgatcgccaggtggcggggctgctttttggtaaagtgcagcgcgcccgggaactggggctaaaaatgatcattgtccccggtagccagcttagccaactgccgccaggactggatagcaccgagtttgcagccattgtgggcaatttacttgataacgccttcgaagccagcctgcgtagcgatgaaggaaacaagatcgttgaattattcctcagcgatgaaggcgatgatgtggtgattgaagtcgccgatcagggctgcggcgttccagagtctctacgagacaaaatatttgagcagggggtcagtacgcgtgctgacgagcccggtgaacatggcattgggttgtacttgattgccagctacgtaacgcgctgcggtggtgttatcactctcgaagataatgatccctgcggtaccttatttagtatctatattccgaaagtgaaacctaatgacagctccattaaccctattgatcgttgaggacgaaacgccgctggcagagatgcatgcggaatatattcgtcacattcccggattcagtcagatattactggcgggaaatctggcgcaggcccgaatgatgatcgagcgttttaagccggggctaatcttgctcgataactatcttcctgacggtagagggattaatttactgcatgaactggtgcaggcgcattatcccggcgacgtggtgtttaccactgcagccagcgatatggaaacggtgtctgaagccgtacgttgtggtgtatttgattatctcattaagcccattgcctatgaacggctggggcaaacgctaacccgtttccgccagcgtaaacatatgctggaaagtattgatagcgccagccagaagcaaattgatgagatgtttaatgcttatgctcgcggtgaacctaaggacgagctaccgaccggcattgaccccttgacgctaaacgcggtgcgaaaactgtttaaagagcctggtgtgcaacatacggcagaaacggtggcgcaggcactgaccatcagccgcaccactgccaggcgttatcttgaatattgcgccagccgccatctgattattgctgaaattgttcacggcaaagttggcagaccacaacgcatataccacagtgggtgacatgataaagccggaggaaacttgcctccggcattactatttacttgcctgtgaccgctgctgccgttcctggcaccatcagctctgtagcaacgataacaatcaccaaaccaacaagcaccggtacgctggtgcgttttacgacttcaaacgggctgatcttcgccatcccggcaaccgcaacgactacgccagaaacggggctaagggtacggccaaggttactcgcctgcagcatcgggatagtcaaatacgccgggttaatgccggaagagtgcgccagtttcgggatcatctcaacaaacgcataaaacggcgcattgccactaccggtcgtgactgccgccagcattgtcagaatcaccaataccagcatcaggatgatactcgcgctaccaaagctggtagcgatagaaatcagactttgaataaagccgatggtgctaagcccctgagcgaataccccagcggcaaccagcagcatcaccacgttagcaaacgcatctgccatcccgcgataagccacttccagaccagagaaaactttctgggtattaaagctgcggaggaactccagaatggaggcaatcagcatacaaatcaccagaatagtgatgatgtgtaattgcggaccccatttaccgtcaaaaatcagtacaccgatgatcggcgtgaacggcaaaatggcataaaacgcaggagcagtggtggtgatttcactgacatctaacatttcatgagagatgtgctcttttttatccagataacgttgccagaagaagtgggcgatcgccatgccgataattgcagcaatactgataggcagcgtcgttttgaaggcgaagtcaatcaggctcatttcggaagcttgcgccgccagcaccacatccccactagtcggtgcgagaataatcgccgccggggaggcacaaatggcagcagctgcgccacgactgataccaacgtttaccatcaccggaaatagggttgccatcagcaaaacacccagaccggttgcggaagagacggccagagacatcagacaggcgacaaaataggcggcaatcatcagcaggtaaggggagttaatatactgcaatggtttactcgccagcttgaccaccatatcattcgcgccgatatgggtcatgtaagcggcaaatccacacagcatcataatcatcatgccgaggtcgccgccgcggctcattagtaatattttaacgtattcaacgatatccgtggcgctgtagcctgtactagcctggctggacggtaacactttgtgccccataatggcactgataatcagcaataacaggccaccgacaaataacacaccagtggcggaataccctttaatgatgtagcgagctacacccacaataaccacaaccccaataaggagctcaatgaatgtcagcataatttttcctgtctccaggccccaaagtaaataataaaaaattcctaaagcttaaggaaaaaatatgcccaataaattggcgatgaatgctgattaaaatcaagaaaaactgccattaagacattgaagttgctgtttttatacatagataacaaaacgcatatttagcggttggcaattatcacataataatgtgtgcaaattgatggtggattgatgcaaatttgttaattgcaatggtgttagctgcggctgtgcgctcaaaaaataatctaatatgagcataggttgacgatatatattatatacttcgttaagatgattgttgtatctcgttaaaaaataaaataatttttccttgattgcattttgtcatcaaaaaagacttggtttttcttttttgactattcccatcgcagaaaacgacgcatcatctttaatcgatgcgcggaaatatttaacttgaacaagcggaaataaatagagcagctattcagattattctttatgttgggtctattaaggttatgttaattgtagctttgctatgctagtagtagatttttgataaatgttttatggtcacaaatgaacgtgagtaaatatgtcgctatcttttcctttgtttttattcagttaatcagcgttggtaaagtttttgctaacgcagatgagtggatgacaacgtttagagaaaatattgcacaaacctggcaacagcctgaacattatgatttatatattcctgccatcacctggcatgcacgtttcgcttacgacaaagaaaaaaccgatcgctataacgagcgaccgtggggtggcggttttggcctgagccgttgggatgaaaaaggaaactggcatggcctgtatgccatggcatttaaggacagctggaacaaatgggaaccgattgccggatacggatgggaaagtacctggcgaccgctggcggatgaaaattttcatttaggtctgggattcaccgctggcgtaacggcacgcgataactggaattacatccctctcccggttctactgccattggcctccgtgggttatggcccagtgacttttcagatgacctacattccgggtacctacaacaatggcaatgtgtactttgcctggatgcgctttcagttttgagacaaatgaagttttagtaacttctttaaaatcaatagctaaaataagtaacatcaaaaataacgcgacttttatcactttttagtaaagttacactggacaaagcgtaccacaattggtgtactggtaaccgacacagcatttgtgtctatttttcatgtaaaggtaattttgatgtctaagattaaaggtaacgttaagtggtttaatgagtccaaaggattcggtttcattactccggaagacggcagcaaagacgtgttcgtacacttctctgcaatccagactaatggttttaaaactcttgctgaaggtcagcgcgtagagttcgaaatcactaacggtgccaaaggcccttctgctgcaaacgtaatcgctctgtaagatacgtcagcaagaattcaaaacccgcttaatcagcgggttttttttggtctttagtgtgcggtactggcgctaaacagccagaatgccagtgcggtcatggcaaaagaccccagaaggttgacgaaaacgttcagtaatgcccagccaaagcggccctcttgtaacaaaaacaccacttctgcgctaaatgtactgaaggttgttagaccgccacaaaatccggtggtgattaatactttccacactggatcaatgttcgtcatcctgctgaaccatgcgaatcctattcctatgatgaatgccccaatcaggtttgctgtcagcgtccccaacggaatcgcctgatgcagtgggttaaatcgcatacttaacagccatctcgccacgcttcccgtaccaccgccaataaaaactgctaaaagaagttgtaacactgcaaaatcctgctatttgatttgtatgagtgataagtgtaacgccgaataatcgtcgttggcgaattttacgactctgacaggaggtggcaatgctggttgccgcaggacagtttgctgttacatctgtgtgggaaaagaacgctgagatttgtgccagcttgatggcgcaggcggcggaaaacgacgcaagcctgtttgccctgccggaagcattgctggcgcgcgatgatcatgatgcagatctaagcgttaaaagtgcacagctgctggaaggcgaattcctcggactttacggcgagaaagtaaacgtaacatgatgacgacaattctgacgattcatgttcctagtacgccggggcgcgcatggaatatgctggtggcacttcaggcaggaaacatcgtcgcccgttatgccaaactgcatctctatgatgcatttgccattcaggaaagtcgccgtgttgatgctggtaatgaaatcgctccgttactggaggtggaagggatgaaggtcggtctgatgacctgttatgacttacgctttccagagctggcgctggcacaggcattacagggagctgaaatcctggtacttcctgccgcctgggttcgcgggccgctcaaagagcatcactggagtacgttgcttgccgctcgtgcgctggataccacctgttatatggtggcggcgggggagtgcgggaacaaaaatatcggtcaaagccggattatagatccctttggcgtcaccattgcggcagcgagtgaaatgcctgcactcattatggcggaagtgacgcccgaacgtgtgcgtcaggtgcgcgcgcaactgcccgtcttaaacaaccgtcgctttgcgccgccgcaattattatgatgtttttttactcggcgcttgattcaccttgttacagattgctattgtgtgcgcgcgtcgaatgaccgttaatattctctggtttttaaggcgcgttctgttgccggttatatgtcaagaaggtatctatgggtgagattagtattaccaaactgctggtagttgcggcgctggtcgttctgctgtttgggactaagaagttacgtacgctgggcggagaccttggagcggccattaaagggttcaagaaggcgatgaatgatgacgatgctgcggcgaaaaaaggcgcagacgttgatcttcaggctgaaaagctctctcataaagagtgacgtggcgagcaggacgctccctcaatatcttgttcgatacaaaaaacccgcttcaaaaagcgggttttttatcagacagatgtaagtaattattacaggattacttaacttccatccctttcgcctgcaaatcggcgtggtaagaagagcggacaaacggaccgcatgcagcatgggtaaagcccatcgccagcgcttcggctttcatttcgtcgaactcatccgggctaacgtaacgttgaaccggcaggtgatggcggcttggctgcaaatattgccccagcgttaacatcgtcacaccatgacggcgcaggtcgcgcattacctcaataatttcttcattggtttcacccagtcccaccatcagaccagacttggtcgggatttccggatgcgcttctttaaagcgttccagcagcttcaggctccagttgtaatctgcaccaggccgtacctgacggtaaatacgcggtacgttttccaggttatggttgaacacatctggtggcgttgcagtcagaatatccagagcacgatccatacgaccgcggaaatccggcaccagagtttcaattttgatttgcgggcttttttcccgaatggcagtaatgcaatccgcaaagtgctgggcaccgccatcgcgcaggtcatcacggtcaacggaggtgataaccacataacgcagcgccatatcggcaatggtctgcgccagtttcactggttcattggcatcaggagctaccgggcgaccgtgggcaacatcacagaacggacaacggcgggtacaaatagcgccgaggatcataaacgttgctgtgccgtggttgaagcattccgccaggttagggcaggaggcttcctcgcagacagaatgcaggccatttttgcgcattgcggctttgatgccctggatacgtgtagagtccgctggaagcttgattttcatccattccggcttgcgcagcagggcttcgcgctctgttgccacgtttttaaccgggataagggccatcttatcggcatcgcggtatttaacaccgcgttccatcacaatgggtttactcatagcgtgcgtgttccagttgcgaattacgaaggaaagcgtttcaattcaatagattgttgtaattatcaactatttttgaattaacgactggcagtatatcattgaaacggacctgaaagcagccaaagcggtcgcgaaaatgtaaaattgttgttggattgtgccattttatcgttctgcgctgtgatctggctgtaacaatactttttcaaaatgcattacggataacatctattactccgtgcaggatgggatcacgcaggctgaatttgttgtagtggatagagaaatctatttgctcctcatttaaggacggaaaaggcagtttttccagcggccagcagcggctaaacaggttataaaaacggctgggaataatcgctaacatgtcactgttggcaaccagtgcagcgattgtcaaaatgttgtagctggtgaaattgatttgccggtccggaaacatttcttgaactctctgccgcagaccgctgaaattttgctcttccggtaacagaagtacatgcgcagcgttgtcgatagtctctctgtcatcttctaaagagagtagtggatttccctcgcggcaaattaacaccatattgtcggtgaacagaacatgatgttgcaccgtacgattggtgcaaaacatgttatcgatgatgagatcggtttgaaactgactgagttggttttccgcgtcgctgatgggcgggttgcgcagtaaaagctgcggatagtgagttttaatcgcccgatagatgacaggaaggaccagtgctccgacgctgggagtggtcgcaatagttatcgttcgttgcttatcatagcttccttcgatatccagcgcgccaagaatggactcaaggccctgactgatatactcatgtagatgcatcgcaaatgcggtaggagtgacaccctggcctttgcgaataaacaatgggtcagggaatataacgcgcagtttctgaatagactgactgattgcgctgggggtcagattaagcactttcgctgcattaacgatccctttatgtacatatacagcttcaaaaatagtcagaaggttaagatcaatatttcgtaaggttgtaaatatttgtggtttaccttcactgctctttctgcttaaacagggttcaatttgattattactatccacgcacttactccaattttattcatggaaaaataatatttaaaaaattacaataatcttatgtctaattggaacggaacgcttttgctcaccataatcaactatttcaataggttaatcaatggggtgagttacggagcaaggcgtggcaccgcatttctgcaagtgataaagaaaatatacaaacgcgaaggagatgtaaagcattagcagatattatgagtaatgacccagtgtaaattgggccattgatgtatggaattaagcggtaatatattcgaagtccggattgtttagtagcgctaaaatattttccagtaaacgtggagcaatattattagtcgtcgcttcgggtttccattgacttattttagccatttccattccggcatacccacaaggattaatacgtaaaaatggactaagatccatattgacgtttaatgccagaccgtggaaactacaaccgcgtcgaatacgtaaacccagactgcaaattttcttttccccaacatagacacctggcgcgtcagcccgaggatgcgcttctatacccagttcagccagggtattcaccactgtttgctcaagcaaggtcaccagttcacgcacaccgagtttacggcgtttcaggttaagcaacacatacatcacctgttgccccggcccgtgataagtcacctgcccaccgcgatcgctctggatcaccggaatatcacccggcattaaaatgtgctccgcttttcctgcctgaccttgggtgaataccggatagtgctcgaccagccagatttcatcaagggtactatcatcgcgggtatcggtgaattcatgcatagcctgggagattggctcgtaaggctgaagaccgagctggcggacaagaattttatcctgatacaaaacggcatctccgtggagaatgagtaaaagtgggggaaaagtatatcacagcgaggagaggggagttacccgaccaggagccgggtaacggagaagcgagttacagaaccatgcggacaatatcgattttgcccagttcttcatacagtgtttcaacctgctcgatatgagtggcgttgatagtgatagatacgctgtggtagttgcctttgctgcttggttttaccgttggggtgtagtcacctggcgcatggcgctgtaccacttcaaccacctgatcaaccagctcaggtaacgcctgccccataactttgtaagtaaaaggagtagggaattcaagcagttcgttaagtttggttttcatgtcagctccggcgtaacgtaattaaatagcaactcccgccagaaggcgggagttttttactgatgcttagtatatggggacggaaattacactttcaagtgtttaatttttaaccaaaccagtgatggaacattaatttaatgtaatcaatgattttgccgaagaagttaccttccgggatttcttgcaacacaaccagcgggcgttgctcgatcgttttgccatcaagctggaagttgatagttccgacgacctgattcttttgcagcggcgcatgcaattcactgctgttcagcacatagctggctttcagatctttcatgcgaccacgcggaatggtcaggtacacgtctttatcaacccctaagctagcgcgatcagaatcaccaaaccaaaccggttcagaggcgaactctttacctactttcagtgggttaacggtttcaaagaaacggaagccccaggttagcagttttttactttcggcttcacggcctttaaaagtacgtccgcccattaccgcagaaatcaagcgcatctggccttcagtcgcagaagcaacaaggttgtaacctgctttgtcagtgtgtccggttttgatgccgtcgacattcaggctgttatcccataacaggccgttacggttcagctggcgaataccgttaaacgtaaattctttttctttatagatgctgtattcattcggtacgtcacggatcaatgcctggccgatcagcgccatatctcgcgcggagctgtactgaccatcagcatccagaccatgtaccgtctggaagtgggtatttttcaggcccagtgcgttaacgtagctgttcatcaagccaacaaaagcgtcctggctaccagcggcaaaatcggccatggcgacacaagcatcgttaccgctttgcaggttaataccgcggatcagctgagaaaccggaacctgcatgcccggtttgaggaacatcaggctagaacctttaaacaccgggttaccggtggcccatgcgtcgttgccgatagtgactaaatcagtttctttaaatttaccggctttcattgcctggccgataacgtaactggtcatcattttggtcaggctggcaggatcgcggcggacatctgcgttctgttcggcgagcactttgccggagttatagtcaatcaggatgtaggactccgcatcgatctgcggtacacccgggatcatagttttgatattcaggtcatcggcatgtgcagcagagataaaggctgtgcaaagagccgtggtgagcgccaggcgcttcatgatacgagcggaaaaaatggtattcatggtctgaactacgacatccgtgatggaattaaaaaagtgccctactatagcaaatgcactaccggcaggcatctgactttccgcgtgactttgttaacgtcatttacagaaattgacacatcagatgcctgctttacgttactgcgcggtagtaataaaactctgtaattgggcttcggtttgcaaacgttgctgcaaggtactggcttcggctttgctggcgaatgggccaagctggatccgccagaccgcgccattttgagttacgcgaccggggacgccgaacttctgtcccagttgctgttggtactgttgcgcacgagcctgatcgcttacggccccgacttgcaccataaagttgccgctggcgctttggctgacggcttgcggtgtcaccattgcagggctggttgcaggcgttgtgctcggagctgtaacaacgggctgtggcgcaggcgtcggttcgctgccttccagtacaccaggcgctaaggtcgttggtgcgccgaggaaaccgctactggttaccggcgcgccggtcggatcttcgctttttagcgtgctattactgaccggaagaatgtcaccctgcgggccagacacactacttgttcccgcgccaccgcttaaatcgggaggtgcaggcagggcgtaagtctgtttggcgactgtggtacaagccataccaggaccagaaaggctaccatcctgggcaacaataatcggatcgatacgaactttggtgttgttactcgtgttaagacggtcagctgccgcgcgagaaagactaataacgcggtcgttgccgtaagggccgcgatcattaatgcgcaccacgatcattcgcccgttagccaggttagtgattctggcgtagctggggatcggaagcgttggatgggctgccgtcagctgtgtcggatcgaatgcttcgccagaggccgtcaggttactgccgggttcggcatcatagattgccgccagtcccgcctggctaaatcgagacggatcctgcacgattttgtagcttttaccgtcgcgctggtaatcctgatttgccgtcgcgttcagtggttcgaaacgcgggtccgccccgctaatttcaactatagggccgttacataccgcaggctgcggtacacttaccgtctgttgctgaccatcatcgcttgtacatgccgcgagcattcctgccgcgatgcagatcccgagccactgcttacgcattgcgcacctcttacacgcttttgctcaacattttcctgtgggtgtggatactcattacaatcccgaacccagccatcagcacaattagcgcgcttcctccataactgaccagtgggagcggaacccctacaaccggcagaataccgcttaccataccaatatttacgaagacataaacgaataatatcagcattaagccgccagccatgacgcgaccaaaggtggtttgcgctctggcggctatccacagcccgcgcatgatcagcagaatgtagagagcgagcagaatcagaatgcccactaatcccagctcttccgccagtaccgcgaagataaagtcagtatggcgttcggggagaaattcaagctgactctgagtgccgtgcagccagcctttgccgcgtaatccgccggagccaatagcaattttagactgaataatgtgatagcccgcgccgagtgggtcactttccgggtccaggagcatcattacgcgctggcgctggtaatcatgcatcaggaagaaccacagaatcggaatgaacgccgctaccagcactactgcgacgccaatcagacgccagctaaggccagagaggaacagtacaaacagaccggaaagcgcaacgaggatacttgttcccaggtcaggctgtgcagccaccagcagcgtgggcataaatatcagcaccagcgcgatgccagtgttcttcaagcttggcgggcaaacgtcgcggttgataaagcgcgcaaccatcagtggtacggctattttggcaatttcgctcggctgaaaacgaacaataccgaggtccagccagcgttgagcacctttagagatggcaccgaaagcatctaccgccaccagcaaaataatacagatgatatagagatagggggcccagccttcataaacgcgtggaggaatttgcgccatcaccaccatgatgaccagacccatcgcgatttggccgattttacgctccatcatgccaatatcctgaccgctggcgctccagataaccagggcgctgtaaaccagcaatgccagtaagatcagcagcattgtgggatcgagatggactttatcccagaatgtttttttattcggattatccgtcatgattaatggtcctccgctgcggcaaccgctggattttccgcaggcagatcggtgttgttatcacccagcataatgtggtcgaggatctggcgcatcagtgtaccaaccgccggacccgcaccaccgttctccagaatcatggcgacagccacttgcggattgttgtatggcgcaaaggcggtcatcagtttgtggtcacgtaaacgctcggcaattttgtgcgcattataggtttcgttcgctttcagaccgaagacctgagcggtaccggatttcgccgcaattttgtacggtgcgctagcaaagtatttatgcgccgtaccgttagggcggttagcaacaccgtacataccgtctttcgccagctcccagtaaccggaatgaatatcgccgacgggcggttcatgcggctgtacccatggcacctgtttgccgtcttcggcggtgctcatcagcaaatgaggaaccttcacgataccgtcattaatcaggatcatcagtgccttactcatctggattggggtcgctgtccagtaaccctgaccgataccaaccggaatggtgtcaccctgataccacggttttttaaagcgtttctgtttccattcgcgggtaggcatgttgccggaacgttcttccgccaggtcgataccggtgtaatgaccataaccgaatttacccatccattcggagaggcgatcgatccccatatcgtaggccacctgatagaagaaggtatccgcagattcttccaggcttcttgtgacattcagacgcccgtggccccattttttccagtcacgataacgtttttcgctacctggcagttgccaccagcctgggtcaaacagcgtcgtattgcgcgtgatcaccccggcgctcaatgcgctaaccgccacatagggtttaactgtagacgcgggaggataaaccccctgtgtggcgcggttcaccagcggtgtattcggatcgttcaacaaggcggaataatctttgctggagataccgtcaacaaacaagtttgggtcataactaggcgtggaaaccagcgccagcaccccacctgtacgcggatcggtgactaccacagctgcgcggctacccgccagcagcgtttcaatatattgctggagtttgagatccagcgtcaggtaaatatcgtgtccggcttgcggtggtacttcttttaactggcgaataacacgcccacggttgttaacttcaacctcttcataaccggtctgaccgtgcagcacatcttcatagtaacgctcaatgcccagcttaccgatatcatgcgttgccgcatagttggccagtttgccgtcattattcaggcgttcgacgtctttatcgttgattttgctcacatagccgatgacgtgggtcaacgcgctaccgtaaggatagtaacgacgtttatagcctttaacttcgacacccggaaaacggtactgattgacggcaaagcgagctacttgtacttcggtcaggttagttttcaccggaatagaggtgaaacggtgactacgtgcgcgctcttttcggaatgcagcaatatcgtcatcggtcagatctaccacgctgcgcaaagcgtccagcgtttgctgcacgttatcgactttctccggcatcatttctatctggtagatagtgcggttgagggccagagggataccgttacgatcgtagataatgccgcggctgggcgcgataggcaccagcttaatgcggttttcattagagcgggtctggtagtcggtaaagcgaacaatttgcagattatacaggttggcgataagcacgccggtcagcagcaaaatccccaaaaaggcgaccagcgcccggcgcacaaacagcgcggactctgccgtatagtcgcgaaaagagttctgtagtttcatccgctgcgttttctactcaaagctcccttatcactcacggtgataaggatggttggtggtgatgctccacgcccggtacagactctctgcgaccagcacgcgaaccagcggatgggggagggtaagcgcgctcaggctccagctctgctcagccgccgctttacaggcagggctcaacccttcaggcccgccaatcagtagactgacgtcgcgaccatccagcttccagcgttccagctcagcggctaactgcggcgtatcccagggcttgcctggaatatcgagggtgacaatgcggtttttgcctgcggccgccaacatctgctcaccctctttgtcgagtatgcgcttgatgtccgcattcttgccgcgttttccggccggaatttcaatcagctcgaagggcatatctttcggaaaacgacgcaggtactcggtaaaaccggtttgtacccagtccggcattttcgttcccacggcgacaagttgcagcttcacgcattaactccagagtttttccagttcatacaggcgacggctctcttcctgcatgacatggacaatcacatcgcccaaatccacgacaatccagtcggcgctgttttcaccttctacgccgagcggtaacaggcccgctgcgcgagactcctgcacaacgtggtcagcaatggacataacatgacggctggacgtacccgtacagatgatcatgcagtcggtgatgctggatttgccctgaacgtctaaggcgatgatgtcctgacctttgaggtcatcaattttgtcgataacaaaatcctggagtgctttaccctgcaagttttccccctgggtgaatcaaatagataaaaatggtctgtcagtatacctgaaccagaggcgatttcgggacaattgtcgccgaatcggctttcgaaagtgggctatcatcccaccccgcgccgcagattgcatcgccatttttgtaaaacaatttctacaaagtcgtgtctggcggaaaaagtctggctgcggagaatatcagcctgcccgggtctgtcaatggtcgttgcggcttacccgtaaaaaaacagaaaagtcatgcattctcgaccccgatggcacggctattgaggacgcgtagcgtcgcgaatttttggttgatatcaatggcgctccaacacccctggtcaacgcgaaaatgccacatagcttcggcaggcatgccaattaaacgggcgattaacagactcagtacaccctgatggctgacgactaaaatattctgatagtgctgaaattcactaagccttgcgataaagcgttccacacgttggctaaatgcctgaaatccttcaccgttcgtggggattgcatgctgccagtcattgcaccacgcgctatagttttcggcatcttcttgcatgaggtcgcgatgatgtcgcatctcccagtcgccaaaaaacatttcgttgagttcaggtatgatttgcacggggagctggcggtcactgagaaccagtcgcgcggtatgctgtgcccgttccagttcactgcataaaaccagatcaaaggaaacaccatgtagcagcgtatgcagattttgcgcttgctcaataccgcgcgcggtcaggggggtgggcgcatgaccgctgtaaagaccatcgatattcgcttgcgtttcaccatgacgaattaaccacagtcgcatcatgccctccgtaacgacaggtatcagcgatacaagccttgttggttaatgtaagtcagtaccggttccggcaataaatcctcacaactttcaccgttttgcaaacgttcgcggatgatggtcgcgctgatgttaaaccacggcgtttcagccagataaattttaccggcaggctgaaggtgaagatcttccgggttatgtgtcaaatgatcttccagccattgctggtattgcggttgcgccatttcaagtgggtaacctggacgccgacagacgatcaaatgtgcattgtcgagtatcgtttcgtattcgtaccaggtcggaaaggtcagcagactatcctgaccaataataaacgccagcggcacgtccggtccttgttcctgccgccactctttcagtgtttgcgcagtgtaagagggggcattgcgctttagctcgcgttcatcaagagtaaataatggcttgtcggcaatcgccagttcaagcatgtgtttacgctgcacgctgttcgcttccggctggggacgatgcggaggaacattattagggatgattgtgacccgcgtcagaccaatcaaattcgccagcgtttccacgggttttagatgaccatagtgcaccggatcaaaggtgccgccaaacagagcctgtaaagatttcatatcaaccgtcgataaatacgtccgccaggggtttatggcacaacagaagagataacccttccagctctgcccacacactctgaccgtaatcttgtttgagggtgagttccgttcgtgtcaggagttgcacggcctgacgtaactgcgtctgacttaagcgatttaacgcctcgcccatcatgccccggcggttctgccatacccgatgcttatcaaacaacgcacgcagtggcgtatgggcagactggcgtttcaggttaaccagtaacaacagttcacgttgtaatgtgcgcaacaaaataaccggttcgctgccttccagacgcagttgctgaagaatatgcaatgcgcgcttactttttcccatcaacaaagcatcaacccaatgaaaaggggtgaaatgcgcggcatcattcaccgcctgttcaacgcgcggtaatgtcaatttgccgtctggccagagcaggcttaaacgctccagtgcctgagccagcgccagcaggttaccttcataacagtagcagagcacctgatttgccgcgtcatccagttctaagttgagctgttttgcgcgcgcagcaacccagcggggaagctgagcctgctccggtgtctgacaggtcacctgcacgctgcgattcgcaagcgcagtaaaccaggcggcattttcttgcgctttgcttaatttattaccgcggacgatcaacagcaggtcgtcatgcagaagtccggtgagtgtgagaagttgctcattgatcgccgcattcggtccgttttctggtaacaacagcaatagcgtttgtcgactggcaaacagactcatagcctggcataagctaaagatcgcattccagtcagtgttgggatcaatggaaaaagtgtggtgttcttcgaatccttgtgccgcagctacctgacgaacagcgtcctggctttcctgcaataacagaggatcgttaccaagtaaaagatacgccgcgcgcagcccttcattgagctgcgcgcggagttgttccgggtacaaccgaatcatcagttacccagcgtggtggagacgcgtgcaggcgttgccggagtatccgttgtggtgctcgtctgttcttcgtcggaacgaatatccgcagcacggatgcttggcagcttacgaatcagctgttcggcagcacggtcgtacatctcttttacgatcatgtcttgttcgttatctttcgctaacgccatttgcgggttatcgaagaagctacggaagactttggcgctaatcgggtagatatcacggccggggatcaacacggtcgcattaaccgtcatgatcatctgatactctgctgtttgaccgttacggaatacgcttgcggtatctttcgcgatgctcactttacccaaacgcaaggatggaacgtccttacgcgtggtttctttatcaagcaactcgacaccattcagacgtaactggttacgcaccgcacggcttaatggcccgttcggatcgccactgtccaggatcatgaccttcatagtggaaggaacctgcgtggtatcacgcagatgccagccacacccggcggtgattaacaccgccagagataacaacaatgttgccagatatcgcacgcttcctcccgcgcttagccaacgaccagattgaggagtttacctggtacgtaaatcactttacgtacagtaacgccatcaagatattttgctaccagatgttcctggccagcacgttcgcgaacctgttcttccgttgcgtccaccggaacggtgattttggcacggactttaccgttaacctgcaccacgaccagcgtggagtcttccaccatcgctttttcgtcagcaaccggccacggcgcgttgtcgatatcgccttcgcctttcagttcctgccacagcgtgaagcagatgtgcggggtgaacgggttaagcatacggacaacggccagcagtgcttcctgcatcagagcgcgatcctgctcgccatcggttggtgctttcgccagtttgttcatcagctccataatcgccgcaattgcggtgttgaaggtctgacgacggccgatatcatcggtcactttagcgatcgttttatgcacatcgcgacgcagcgctttctgattttcagtcagcgcatcaacgttcagtgccgcaacatcaccttttgctgtgtgctcgtaaaccagtttccagacacgtttcaggaagcggttagccccttccacaccggattcctgccattcgagagtcatatcagccggagaagcaaacatcataaacagacgaacggtgtccgcgccgtaacgttcaaccatcacctgcgggtcgataccgttgttcttgctcttggacattttgctcatgccggtataaaccagttcatggcctgccgcatctttcgctttcacgatacggcctttctcgtcacgttcaacgatagcatcaaccggggaaacccagttacgttcgccgttttcgccaacatagtagaaggcatctgccagcaccataccctgacacagcaactgtttcgctggttcgtcagagttcaccatgcctgcatcacgcatcagtttgtggaagaagcggaagtagagcaggtgcataatggcgtgttcaataccaccaatgtagatatccaccggcagccagtagttagccgcttcggaatccagcataccttctttgtactgcgggcaagtgtagcgcgcatagtaccaggaggactccataaaggtgtcgaaagtgtcggtttcacgcagtgctggcataccgttaacggtagttttcgcccactccggatctgctttaatcgggctggtaatgccgtccattaccacatcttccggcaggatcaccggcagctggtcgtccggggtcggcattacggtaccgtcttccagcgtcaccatcggaatcggcgcgccccagtaacgctgacgggaaacaccccagtcgcgcaggcggtagttcactttacgctcgccaacgcccatcgcagtcagtttatcggcgatggcgttgaaggccgcttcatggtcaagaccgttgaactcgccagagttgaacagcacgcctttttcagtcagggcttgctgagaaagatctggctcagagccgtcagctgccaggataaccggtttgatgttcaggccgtatttagaggcaaactcgtagtcgcgctggtcgtgccccggtaccgccataactgcgcccgtgccgtactccatcaatacgaagtttgctgcccaaacgggaatttcttcgcccgttaatgggtgaaccgctttaaagccagtatcgacgccttttttctccatcgtcgccatttcagcttcggcaactttggtgttacggcattcgtcaataaaggccgccagttcaggattattttccgccgctttctgcgccagcggatgacccgcagctaccgccaggtaggtacaacccataaaggtgtccgggcgggtagtgtaaacggtcagcgtgttgtcatagtcgttaacgttgaaggtgatctccacgccttcggaacgaccgatccagttacgctgcatggttttaacggtgtctggccagtgatccagtttatccagatcgttgagcagctcgtcagcgtaagcagtgattttgataaaccactgcgggatctctttacgttcaactttggtatcgcagcgccagcagcagccgtcgataacttgttcgttcgccagtacggtctggtcgttcgggcaccagttgaccgcagaagtcttcttatataccaggccttttttatacagctcggtgaagaatttctgttcccaacggtagtattccggcgtacaggttgccagctcgcggctccagtcataaccaaagcccagcattttgagctggtttttcatatacgcgatgttgtcgtacgtccacggtgccggagcggtgttgtttttcaccgccgcgccttccgcaggcagaccaaacgcgtcccagccgatcggctgcaggacgtttttgcccagcatacgctggtagcgggcgatcacgtcaccgatggtgtagttacgtacgtggcccatgtgtagtcgaccagaaggatagggaagcatagacaggcagtaatacttctctttgctctcgtcttcggttacttcaaatgtgcgcttctcatcccaatgaagctgtactttggattctatctcttccgggcggtattgctcttgcatggcagccagtggtcctgttttcaatacggctacaaatgtagcgttgaggtggtttttcagatccgcatagcatagcccaaacgtccgcgtcaaaacagcctttcgcgcactcgacgttgaaatgatgcccggattattcatacattaatttacagagtttgtgggcgtattagcaaagcaaggaacaaagaacgtctattattatagtcagttaacgacccgggagatgaaacgatgaacaaggttgctcaatattaccgtgaactggttgcgagtctgagcgaacgcctgcgcaatggcgaacgtgatatcgacgcactggtggaacaggcgcgcgagcgcgtaataaaaacaggggagttaacgcgaaccgaggtcgatgagctgacgcgagctgtcagacgtgacctggaagagttcgccatgagctatgaagagagcctgaaagaagaatctgacagcgtctttatgcgggtgattaaagaaagcttgtggcaggagctggcagacatcaccgataaaacgcagcttgaatggcgcgaagttttccaggacctcaatcatcatggggtttatcacagcggagaagtggtcgggctgggaaatctggtctgcgagaaatgtcacttccatctcccgatctacacaccggaagtgctgacgctatgcccgaaatgtggtcatgaccagttccagagacgcccgtttgagccgtaatagtctgatttcgcacagcaataaagagaatatgggccgaatgaaattccccggcccttgtttttatctttacagtaaatcttcagtctcacgaatttcctgactgacatctctggttccggaactctgaactttacgatacaggtcgagagcctgtcggagatcgacaggtcttccttctccgtagtgatacataatggccaggttataccaggcagtggcgtcattgcattcagcggctttcgtaaaccattcaaaggcagcctgataatctttctcaacgccttgtccgtgtttatacatataaccgatgttgacgtaagcgccgacgctcccctgagcggcagccttcagataccagtacatcgcttgcttatagtcctggtccaccccttcgccagcgttataatcccatgcaatttgaaactgggcgtgccgattaccctgctgtgcgcttttcaaataccagaatgcggcgagtgtcttgttttgagcaacgccttttccgtcttcataaagatcggccagattgttttgcgcgtcactatggccttgtaatgcagcttgtttgtaccagaaaaatgccagcgcatagtcttttgcgactccgttgccatttctgtacatccacccaagattattttgcgcataagacattccgctctccgcggctatctgataccagacaaccgcttctttataattgggggcttctccacgatccagtgtccagccaagggcgttggaagcgaaagtatggccttgtagggcagcttttttcagccagaagatggcttgctcattatctttatgacggcttttatcctcggtatacttttgccctaaggaatactgtgcttcacaatgaccttgctcagcggccagcttcagccagtaaaaggctttttcgtcgtccggagaatcaattgcgctatcgcgattataataaaacccaacaatatattgagcctcgcaatcgcctttttcagcacgttcgataatctcatctatacttaaattatcgcagcaactactcgtgaaaatcattatcatttccttatggttgcagataaaacatattatatttttatgtgttccatttttgcgtaagccttattttatgcgtattatgtcgcgtcagaaaagtataaataaacgagcctcgcaatgcggctaatattcatttaatgaatatttaaggataaattatatggacatggagagccaaaaaatattgtttgcactttccactccgatggaaatacgcaatgaatgctgtttacctagccatagtagtcccaaaatgtatttaggtacatgcttttttgacctttcttccagttggggaattgatgaccgtgatgacctgctgcgcacaattcaccgaatgatcgataacggtcatgccgctcggttggcagggttttatcaccgctggtttcgttatagcccatgtgaatggcgtgactatcttgctgaactaaatgagcaaggtcaggcttatgcgcaatttgtcgccagcaccgccgaatgctgtggcgaagggggaatcaaagcctgggattatgtccggatgggttttttaagccgaatgggcgtacttaataactggttgagcgaagaagaaagtctatggatccagagccgcattcatctacgggctctacgttattatagtaactggcggcaatactttgccggttatacctttggtcggcaatattggcagtctcccgaagatgatcatctgcctttattacgcgaattcttagcgcgtaaagaatacgacgattccggcaatgatatgttttatcaattatttgccagtgatgatgcgtattaccctaccttgtcctggcaaccattggcttactattctgcatgcccggaaacgcttaaggatatgagcgacctatgaaaaattgctggaagatcctcgatatagaggaaacgactgacgtcgatattatccgccgcgcttatctggcgctgttaccgtcctttcatccagaaaccgatccgcagggttttaaacaacttcgtcaggcgtatgaggaggcgctacggattgcgcagagccctgctaaatctgtttggcaaccagaagaatatgaggtagcagaacatgaaattctgctcgcctttcgtgcgttacttgcctctgatagtgaacgttttctgccctccgcctggcagcgattcattcagcaattaaattattgcagcatggaggagattgatgaattacgctggagcctgtgcacaatcgccatgaacactgcccatttatccttcgagtgcgtggtgttattagcagaaagattgcggtggttacaggaggaaaataccggggaaatagacgaagaagaactggaatcctttttatatgccattgcgaaggggaatgtttttaacttccagaccattctgcatctgcccgttgccgtgcaaaatgacaccatcgatttttaccaaatgttcgctcggatttggagtagccatccacaatggctgacattgtatttagcgcaacatcgcgcagtgattatccccgatgatgcaaaactgcacagaaatttactccgctggtatagcgcaggtcgcctggatatccccgaacttctggattacgcccagagttggcgggaaactgaacctgataatgaagatgcgccttattatgaatacgcgcaacgcgtctattgtggagaaggcgaaagcctgttggcagaactttgtgactactggcgcgagtatccctccacccaggcggatgctttaatgttgcaatggtgccgtcagcatcgggtcgattattacccattactggtgatgatgattgaagcgcgtgatctggttaacgatcagggaaaaccgctactttatgtccccggcgacagcgcccgtacgcgttttcatttatacgaaatactcagcgatgaaaaactctctgcgctggggcgtagtctggtcgagatggttttgcacaaaggacgtaagccgcggatcagtctcacgcgtgatacagaacataccttatggccattatatctagttgccaaacaattagtgcaggcctgccaacctacagaagaaagtttaatgccgattgtgagccgccttgatgcagaaaatcgttgtccactggaagcattaattattcgtcgattattaattcaggcggcgaattttaccgagaagcaaactgttgaaccggagccgcaaccgcagccaatgcccgttgacgatggtgggccaggctgtctgggcatcattaaaattattttctatatttttatctttgctggtttgatagggaaaatactccatctgttcgggtgacagtcgacgttaatgtgcgggaagcccggcaagtaatctttccgcatttttgtaatgttgtttggcggtcagttttaaccatttttgagattcataatggttaacattaataccactgccatttctgtagatcaaacctaaagtatattgagcatgagcatacccttgttcagctgcttccttataccagagaattgctttacgggtgtcgggtttgacccccagacctttgaggtagatccaccccagtttactttgcgcgcgtggattttcctgttccgcactttgctcataccagtatctcgcctgtgtataatccagtggtttaccgtcgctaccatgaagataaaattctccaaggcgatattggctcgtactgtgaccatgaatcgcggaaagctccgtggctgccgtggtgaatggaagactgcccggactgcttaaataatcaaaggcataattcaccatggctttatcacgcaacgtcgttttcttgggttggctaatacaggtaattgctgcaactataaaaattgcgaatatatacattaattttttattcatgtgtgaatgcttcgattttctttttattttgaaagcgtcaagtttatactcatcaataataaaaaagtagtcagttaatgcacttaagggattattaacaaatgaataaggaagaacaatatcttctttttgcgctttctgcgcccatggaaatacttaatcagggttgcaaacccgcgcatgacagcccaaaaatgtatactgggataaaagaattcgagctcagtagttcctggggaataaataatcgtgatgatttaattcagactatttatcagatgactgatgatggtcatgccaatgatttagctggcttatatctgacatggcatcgctcttcccctgaagagtggaaagcattaattgctggtggcagcgagagagggttgatttatacccaattcgttgcccaaaccgctatgtgctgtggggaagggggaatcaaagcctgggattatgttcgaatggggtttctgagtcgggtcggtgtgctcaacaagtggctgacggaagaagagagtttatggctgcaaagccgcgtctatgtacgagctcaccattactatcacagctggatgcactatttttccgcctatagcttaggacgtctctactggcaatcttctcagtgcgaagacaacactagcctacgcgaggcgctaaccctgtacaaatacgatagcgccgggagtcgtatgttcgaagagctggcagcgggaagcgatcgtttctatgccacgcttccctggcagccattaactgtccagtctgaatgcccggtaacgcttaaggatgtgagcgacctatgaaaacatgttggcaaatcctcgaaattgaaagcacgacgcaaatagacattatccgccaggcttatcttgctcgcttaccgttgtgtcatcccgaaaccgatccgcaagggtttaaagcattacgccaggcctatgaagaggccctgcgactggcggtaaatcctgtcgaggaagcagatgatgaagaaaaagatgctgccgctgaacatgaaatactacgtgcattcaggacattactggatagtgaaagtgatcgttttcagccttccgcctggcagaaatttattcagcaattaaatacctggaacatggaggatgtcgatcaattacgctggccgctgtgtgcaatcgccatagaagcgcgatatcttagtttaaattgtgcttctttgctggcagagcgtttgaactggcatagttttaatgacagcgaaggaatggatgaggaagaaagggaggcttttcttgaggccattcaggctggtgattgtttcgatttccttagccttctggaatatcccattgcgttgcagaaccagactgttgagtattacttcgcgctggaacgttgctgccgttaccatcctgactatgtcactgcgtttttggcgatggaaggtccgtggttaattcctgatgatgcaaagttacatcgcaaactgttgcgctggtacagcagcgtgcaaacaggtatggcggaactcattcctgtcgctcaacagtggcaaacggaagaaccagaaagcgaagatgcccggtattacttgtgtgcacaacgtttgtactgcggcgagggggaaagcctgcttgccgatctctgcgcgtactgggaaagttacccatctacacaagctgataatttgttgttgcagtggagcaagcgtcattgcccggattatttcgcgttattagtgatggttatcgaagcgcggagcatggtagatgcgcaaggtcaaccgctgaaatatgttcctggtgagagcgcccggacgcggctgttatgggcggagattttacatagcggaaaattaagcccgttaggtcaaagctttattgagagcttattcttcaagcgcaaagcatgggcgtggtggaaaagcagagtcggtagcgagacagagcaagatagtccgttcctggatttgtatcgggtagcggaacaggtagtacttgaagcgtttccgaaacaagagatgctggcccgtcttaatacaaggctggaaggcggagatgctcatccattagaggccattgtcacccggatgcttttgacgaaagtgaaactcgagccggaggatgaagatgtcgatgagccaacacctgaaaatcatgaagaaaaaaatgatgagggtgaaaaaccacagagcattaccagcattatcaaaatcagtttaacggtgctggtgataggttatgctctcggcaaaatcgcgatgttgtttagctgacgatgtgttttttgcgccgatgccggatgcagcgtttacgccgcatccggcagccgtgtttatgggatctcaatggctaaataatcgctcgcccgccgccgaacttcatccacgcgggccatatcgttactctgcaacgccgcatcaaaatcggtgatcacccggccgatctcttctcgctcgtcacccagcgcccgcgcccacaactcttccagtttggctttaaaggtgcgattgatgagcatatcgcgcggataaattttcaatgcggataaccgcgtccgactctcttcaatctgctgcgcgctcaatgttaccgggctgtggttaatcactctggacttaacgctgccgtcttccagaagcacgtcaacttcaagcaacccgttgatatcataactaaagcgaatatcaatgctctgataagccccggttttcttcaacggcacatcgaaggattccaccagaatgttgtttttaactttgtggttttctccctgatagacgttaaccgtaatactatcctgttccgggtgcatggtactataagtttctacacggctcacgggcacagtggtgtttcgttcaataatcgggctgaaaatgccggaaacgccctggcggttaacttcaacgcccaagctgtaagggcaaatatcagtgaggattacctcttcaatatcttcactgcgtaagcggcaggcggcctggattgctgcgcccagcgcgacaatggtgctcggatcgtaactttgatacggtaatttgccaaacagacgcacggcgattcgctgcaccagcggcatttgactcgcgccgccaaccagcaccagactgtcgatttgactcggcttcagacgcgcatcgcgcaacgcctgttcaatcggcactcgcaagcgattgagcagcggcaaccacaaatcttccagttcgttctcgtaaaattcgcattcccgcgtttcttcctgatactgccagcgaatgtgcaatgggctttgattgctacattttgccgcttccacacaggcgtacaaggctgccagttcactctcgttaagcgtggtcctggcgacatccgcgcgttttaaaacctcatcgaccagcatatgggtaaaatcttcgccaccaagaaagttgtcgccagcggaggcgtgaacttcaatcaccggcgtggcgtactcaagcaccgtaacgtcaaacgtgccgccaccgagatcaaacaccaggctacgggtattttgttgggtatgcaggccatacgccatcgcagctgctgtgggttcattaattaagcgtaccgcatttaacccggctaactccgctgctaaacgggtatgcttgcgttgttcatcgctgaaataagccggaacggagatcaccacatctttaatcggacgttgcagaaattcttcggcatcttcttttaaactgcgtaataccaaagaggacagttctggcgcgttaaatgtgtcgctgcctaaccgccagttggtattactgcccattgcacgtttaaataacgctgccgttttatccggatggctagtacgccgacttacagccggttttccgactaaaatatgattattttcatccatgctaattatggatggtgttaaatattcaccgaacttatttggaattaattgcgcggcaccgtctttccagacggcaattaaactattggtagtaccgagatcgataccaatggcgagttctgcattatccattgcatttatatcttgaaagaaaaagagataaacagattaagaccacccaggtaacgcgtggtgatcttaatcaatgacgtgtgttaagcgtaaaatttcagacgatcagccagtaaatcaacaaagccctgacgatcaacatcgaccattacggtggcattcggtttattgcctgtcagataataataatcaacaaccgtcataccctgggtatatttcccctgtgtttccacgccaacccagcgctcaacagaggtaaataactccggtttcaacagccaggcgatggtgcatgggtcatgcagtggtgcgccgacaaagccccatttttcgtctttatgatattcgaggaagaaatccagcagttcggcaacaatggtactaacagggttaccaatcgcgcggaaacgctcggtgtcttcaacgtggatttgtgctttatgagtaacatccagaccggccatcaccaccgggatcccactctggaagacaatttctgccgcttccgggtcaacgtaaatattaaattcagccgcaggcgtccagttacccagccccatagcgccacccataatcacgatacgggcaattttgctatgcagttccggatggctattgagcagcaaggcaacgttagtttgcggtccggtagacacaatggtgacaggttccgcactttcacgcagcgttttcgccatcagctctaccgccgtacagttttgcggtgcgaatgtcggttccggtaatgccgggccgtcgagaccgctttcgccgtgcacattgtccgcgataatcaactcacgcattaacggttttaccgcgccgcctgctaccggaatatcggtgcgattaagcaaggtcagcatacgcagaacattgcgtaaggttttttctggtgtctggtttccggcggaagacgtaattgctttgacatcaagctctggactggcgagggcgagaactattgcgatagcgtcgtcatgacctgggtcgcaatctaacagaattggcagtgccattgttgctccttgttgtgtgcttctttgcgacaagggtaacgccaggatgtaacagatacgaggggcgaaacgataaagcgtgagatggcgcgcaattgggtatgcgcgccagagtgattaatgcaggattttcgcgaggaagtcttttgcgcggtcgcttttcggatcatcgaagaaagcgtctttcgggctgtcttcgacaattttaccctcgtccataaagatcacccgattcgccactttacgggcaaagcccatttcgtgggtcaccaccatcatggtcattccttcgttcgccagttccaccatcacgtccagtacttcgttgatcatctccggatccagcgcgcttgtcggttcgtcaaacagcatcgcaataggatccatacacaacgcgcgagcgattgccacacgctgctgctgaccgccggaaagctgcgccggaaacttattggcgtgagcagaaagcccgacacgctccagcagtttcagggctttttcacgagccggcgctttatcgcgtttaagcactttcacctgcgccagggtcaggttttcgataatgctcagatgagggaacagctcgaaatgctggaataccatcccgacgcgggaacgcagctttgccagatcggttttcttgtcgttaaccacgataccatcgacggtgatttcaccttgctgcaccggttcgaggccgttgacggttttaatcagcgtacttttgccggaaccagacgggccgcaaaccaccaccacttcgccttttttcacttcggtactgcagtcggtcagcacctgaaagtgaccataccatttactaacatttttcagggtaatcattatgctgtccttcttttcaagtagctgaccaacaagctcgcgctaagactaataacgaaataaacaaatccggcaaacaggatcatctcaacctgcgtaccatcacgctcaccaatggtactggcggtacggaagaaatcggccagggataacacatacaccagactggtatcctggaacagtacgatgccctgagtgagcagcagcggcaccatcgcgcggaacgcctgcggcagaataatcagtttcatgctctgccagtgagtcattcccaacgccagcgcggcgctgctttgaccacgagaaatactttgaataccagcacggataatctcactatagtaggccgcttcaaacatgctaaacgccaccatcgcgctaattaaacggatatcattttttgggcttaatcccagcacgttttgcagaaaacccggcacgatcaggtaaaaccacagcaaaaccataactaaaggaatgctgcggaatacgttaacgtaggctttggcaaaccacgccacgggcgcaaagctggataaacgcatcaccgccagcatcgtgccccacaaaataccaatcactaccgccgtgacggtgattttcagggtgatcaccagcccgtcgagcagatatggcagggaagggacaatggaactccagtcaaactcgtacattatttgccccccatgttgccaggcaggcgaactttacgttcaaccagcgtcatcaccagcatgataaaagcgttaatcaacacatacgccagcgtaatggcggtaaagctctcccaggcatgggcactgtaatcgagcaatttacccgcctgcgccgccatatccaccagaccgatagtgctggcgatggcggagtttttcaccaggttcatcatctcactggtcatcggcgggacgataacgcgataagcattaggcagcagtacgtatcgataagcctgcggtagcgtcaggcccatcgccagcgcggcatttttttgccctcgcggcaggctctgaatcgcggcgcgtacctgttcgcaaacacgggcggcggtaaacagccccaggcagagcatggaactaaggaaaaactgaatattgggatccagctcggccttaaaccacatgccgattttctccggcagcagctccgggatcaccagataccaggtaaagaattgcacaatcaacggcacgttgcggaacagttcgacatacaacgtacccagaccagagagaaaacggtttggaacggtacgtaaaatgccgaaaaaactaccgacgaggaaagcgataatccaggcgcagatgctcaaagcgatcgtcacctgaaaaccactccagatccaaccaagataggtggtgttgccgaacggggcttgttgtaaaaaaataccccagttccagtctatagacataaatctactccagaaaaaagagggtagcagcgttaactgctaccctcgaagattgttacccagcgtattgcggttttcaggcccgatggggaacgaccatcaggcgtatagtctgtccgtgctacgtaacaatcgagagggctggaatttccgcccctggttcttgtaattagttcagtgccttgtcattcggttctttgaacagtgctttcatttcgtcactcagttcgaaattcatgttcaggtttttcggcggaattggatttttgaaccacttatcaaaccatttttccgcttcaccggaggtctgcacctgagcgatggtgtcatccatcagctttttgaactgcggatcatctttacgcaacatacaaccgtaggcctcctgagactgcggcttgccgacgatttcccagttgtctggtttcttcgctttcgcacgttcaccggccagcagagcgtcatccatcataaaggcaacggcacgaccgctttccagggtgcggaaagagtcaccgtgatctttggcgctgatgatgcgcatattcattttttgctcttcattcagtttgttgagcaaaacttcagaggtagtgccggaagtgacgactacggctttgtctttcaggttggcaaaatctttgatatcgccaccctttttggtcaacaggcgcgtaccgaccacgaaaatagtgtcagagaaagccgcctgtttttggcgttcgacgttgttggtggtagaaccacattcaaaatcgaaagtgccgttttgcagcagtggaatacggttttgactggtaatcggaatcagttttacctgcaagtccggtttgttgagtttctttttcactgcttcaacaatggcgttggagtaatcctggctgtaacccaccactttttgctgattgtcgtaataagagaaaggcacactagattcacggtgaccgacgacaatcacaccgtttttggcgattttgtccagagtactgcccgctgccggggcggcgtcatctgcctgtgccagtcctgcggaaagcgccagggcgaggattgctgtggcaggtttacgtaattgcatatccaactcctttatcttctgcgttaagaacgcatggatacccgttgtgagtgtttgtgttgttatcgtctgcaactttattgtgcagtgttgtgcctgttagggaaggtgccttaggtaacatttagtttggctaaatgtaaagatattgctgttttattgtttgtttttgcgagatgcgccgcaccattccgaagcaaaattcttaaaatgcactcttttagtgctaccgctggattactgtggtgcaactaggttgtactgatgctgtttcagggtttgccttgtataacaaagcaatagatgtgccaaagttggataggagaatattgttatccggataatgcactgatgccgcatccggtgagcgtgccgaaatatgggatgtattccggcacgataagaagggattatttacgtcgctgacgcagactcatcaacacagcagcaaaaccaaacaatgccgtcagcacccacagcggccagttgccggtacgtgcgtatggtgtgagtccggtggtcggcgtcacgttagtggttaacacctcgcgggtgaactgcgggatcatcgcctgaatctcaccctgcgggccaatcaccgccgtaatgccgttgttggtgctgcgcaacagtgggcgcgccagctccagcgcacgcattcgcgccatctggaagtgttgccatggaccaatagatttaccaaaccacgcatcgttggagatagtcagcagatagtcggtatccgggcggaagttatcgcgcacttgctcgccgagaatgatctcgtagcaaatagccgcagtaagctcaataccatttgcgctcagcggcggctggatatatggcccacggctgaagctgctcatcggcagatcaaagaacggtgctaacggacgcagaatgctctccagcgggacaaactcgccaaacggcaccagatggtttttgttatagcgatcggcactttcgtagctgtacggcgcacctttacccagcgtgatgatggtgttgtaggtatcgtagcggttctgcttattgagacgcgcgtcgacaatcccggttaccaggctgctacctttatcacgcaactcaccgtccagtgctttgaggaacggttgctgattaatttccagatcggttatcgcgctctccggccagataatcaagctacttttgcccatcagcggtgccgttgcgttgtagtaaatcttcagcgtattaagaagctggccttcgtcccatttcaggctttgcggaatatcgccctgaaccatgctaacctgaatggttttctccggttgtggggtaaaccactggatgtaacgcagcgggaagggaagggcaaacagcacgacggccaccaccagcggacgccagttgcgtttgaccaacgccagtgccagcaggccactaaccatcatcagcaggaagttaatggcttccacgcccattatcggtgccagcccttttaacgggccatcaatctggctatagccgaactgtaaccacgggaagccggtcagtacccaaccgcgcagaaactcggtcacttgccagagggcaggggcggcaatcgctacgcgcagccaggtggttttcggccacagacggctcagcacgccagcaaacagtccggtatacaggctcaaatacgccgccagcagcaccaccaggaagatgttaaccgggccaggcattccgccaaaggtcgcgatgctgacatagacccagttaataccgctgccaaagaggccaaatccccagcaaaagccaatagcggcagactggagtggacggcggttaaaggtcaacgcctgaagccccatcaggctaataatcgccgcaggccagacgtcgtaaggagagaaggccagcgttccgcaggcaccgaataataacgccagcagcaggcgaatgcgctggcgttcaattaaactggcaaaagccatgtagttatctatccagtttcggttttattcatccagcttcggctggggactgtcatccgggattttgacatgaacctgaataatacgccgactgtcggccatcgccactttgaactggtaaccgtcgatgtcgatagtttcgccacgcgccggaagatgcccaaatgcctgcatcaccagaccaccgatagtgtcgacttcttcatcgctaaagtgggtgccgaacgcttcgttgaagtcttcaatggaagccagtgcgcgtacggtccaggtatgacgactcagctgacggaagtcgatatcatcttcttcgtcatactcgtcttcaatctcaccaacaatcagttccaggatgtcttcaatggtcaccagaccggaaaccccaccgaattcgtcaataacgatcgccatgtggtaacgctgagagcgaaactctttcagcatccggtctacgcgcttactttcaggaacgacaaccgcctgacgtaacactttgtccatgctgaaggcttcagcatcgctgcgcataaacggcagcaagtctttcgccatcagaatcccttcaatgtgatctttgtcttcgctaatcaccgggaaacgactgtgggcggactcgatgatgacatcaagacattcgtccagcgtctggttgcgtttcagggtaatcatctgggagcgggggatcatgatgtcgcgaacgcgttggtctgcgatgtccatcaccccttcgagcatatcgcgcgtatcttcgtcgataaggtcgttctgcccggaatcacggatcagcgccagcagttcgtcacggtttttcggttcaccgtggaaaagttggctgagtaacagggagaaaaatcccttcttgttgcttatcgtgtcactactgtgactattgtcgtcgctcatggcgtcgtatgggttctcatgttagttaatcaaaacgccgtcgttaatcaccaacggcggggacgtctgccagtcaaatgcctggcaaattattctttctcggcaatgtacggatcctcatagcccagagcaagcataatctctgtttcgagggcttccatttcttctgcttcgtcatcttcgatgtgatcgtaacctaacaaatgcagactgccgtgcaccaccatatgcgcccagtgcgcctccagtggtttgccttgctcctgagcttccttctcaaccacctgacggcagataaccagatcgcccagtaggctcatttccatgccaggcggcacttcaaacgggaaggagagcacgttggtcggcttatccttaccgcgataggtcagattcagactgtggctttcggcggtatcgaccacgcgaatcgtcacttcgctttcttcctgaaactgcgggatcaccgcattcagccatgtctgaaactggctctcttccggtaacccggaattatcttcacatgccagttgtaaatcgaggatcacctgactcatttttgttcctgttcttcgcgcttgcgttctgctgccagcgccgcttttcgtttttgttcggcttcttcccaggcttcataggcgttaacgatacgcgccaccacagggtgacgaaccacgtcttcgctgtggaagaagttaaagctgatctcttcgacatcggccagcacttcgatggcgtgacgtaagccacttttagtattacgcggcaggtcgatctgtgtgacgtcgccggtgataaccgctttactgttaaaaccgatacgggtcaggaacatcttcatctgttcgatggtggtgttctggctctcatcgagaatgataaacgcgtcgttcagcgtacgaccacgcatataggccagcggtgcgacttcaataacgttgcgctcaatcagtttctcgactttctcaaagcccagcatttcaaacagcgcgtcgtacagcgggcgcagatacgggtctactttctggcttaaatcgccaggcaggaagcccagtttctcaccggcttctactgccggacgagtcagcagaatacggcgaatttcctgacgctccagggcatcaactgccgcagccactgccaggtaggttttacccgtacccgccgggccaacgccgaaggtaatgtcatggtcgagaatattggcgatgtactgcgcctggtttggcgtgcgcggcttaattacgccgcgtttggttttgatattgaccgctttgccgtactccggcacgctctccgcgctttgctccagtacccgcgcttctttaatcgcaaggtggatctgttccggttcgatatcctgaatctgaccgcgcatcggggcagtatcgacatacaggctacgcagaatgtctgccgcagcggtgacgcaaatcggacggccggtcagtttaaagtggttatcgcggcgattgatctcgatgccgagacggcgttcgagctgcttgatgttgtcatcaaacgggccgcacaggctcaacagacgcgcattgtctgctggctccagggtgatttcgcgagtgtctatgttcaaaccgttcctcttatctgtatgccgccggaagctgaacattcaccggcctataaggaaattattcacgccacaggaaaaaggcgcaagcattgcaataaagatggggataaagagagaaaaaacaaggcccaccggaacggcaggcctgagaattacggctgataataacccacgccaaggtcgttttctttgcgggtacgggcaatcacactttccggtgtttctgccacgcgcagacccatttcatcttcagtacgcaccactttaccgcgcagagagttcgggtagacgtcggtaatttctacatcgacgaatttaccgatcatatccggcgtgccttcgaagttgaccacgcggttattttccgtacgcccggaaagctccatgatgctcttacggcttgtaccttctaccagaatacgctgggtggtgccgagcatccggcggctccacgccatcgcttgctgattaatgcgctcttgcagaatatacagacgctgcttcttctcttcttccggaacatcatcaaccatatcggcggctggtgtacccggacgtgcagagaagataaagctgtagctcatgtcgaaattgacgtcggcaatcagcttcatcgttttctcgaagtcttcggtggtttcgccagggaagccaacgatgaaatcagaactgatctgaatatctggacgcgccgcacgcagtttacggatgatcgctttgtactccagcgccgtatgggtacggcccatcaggttcagaatgcgatcggaaccgctctgtaccggcagatgcaggaagctcaccagctccggcgtgtcgcgatacacttcgatgatatcgtcggtgaattcgatcggatggctggtggtaaagcgaatacgatcgatcccgtcgatcgcagcaaccagacgcagcagatcggcaaagcttccggtggtgccgtcgtagttttcaccacgccaggcgttcacgttctgaccgagcaggttgacttcacgcacgccctgagccgcaagctgggcaatctcaaacagaatatcgtcggacggacggcttacctcttcaccacgggtgtaaggcaccacgcagtaggtgcaatatttattgcagccttccatgatggagacaaacgcggtcggcccttcggcgcgcggttccggtagacggtcaaacttctcgatttccgggaagctgatatctacaaccgggctgcggtcgccacgcacggagttgatcatctccggcagacggtgcagcgtttgcggcccaaaaataatatcgacatagtgggcgcgctggcgaatgtgctcgccttcttggcttgccacgcagccaccgacgccgataatcaggtctggattcttctcttttaacagtttccagcgacccaactgatggaagactttttcctgagccttctcgcggatactgcaggtgttcagcagcagcacatccgcttcttccgccacgtcggtcagttgatagccgtgggtggcatccagcagatcggccatcttgctactatcgtactcgttcatctgacagccccaggttttaatatggagttttttggtcatcgacttgctcttgcgaaatagtagccaggaatgcagggcgcatagtgtaatgctttgctgccgttgtgaccagtatgagcgttatcagcccttaggggtaaaaatcctgtaaacttaaagcatattgctaacaggatgattgaccatgacaaatcaaccaacggaaattgccattgtcggcggaggaatggtcggcggcgcactggcgctggggctggcacagcacggatttgcggtaacggtgatcgagcacgcagaaccagcgccgtttgtcgctgatagccaaccggacgtgcggatcagcgcgatcagcgcggctagcgtaagtttgcttaaagggttaggggtctgggatgcagtacaggctatgcgttgccatccttaccgcagactggaaacgtgggagtgggaaacggcgcatgtggtgtttgacgccgctgaacttaagctaccgctgcttggctatatggtggaaaacactgtcctgcaacaggcgttgtggcaggcgctggaagcgcatccgaaagtaacgttacgtgtgccaggcagcctgattgcgctgcatcgccatgatgatcttcaggagctggagctgaaaggcggtgaagtgattcgcgcgaagctggtgattggtgccgacggcgcaaatagccaggtgcggcagatggcgggaattggcgttcatgcatggcagtatgcgcagagctgcatgttgattagcgtccagtgcgagaacgatcccggcgacagcacctggcagcaatttactccggacggaccgcgtgcgtttctgccgttgtttgataactgggcaagcctggtgtggtatgactctccggcgcgtattcgccagttgcagaatatgaatatggcacagctccaggcggaaatcgcgaagcatttcccgagccgtctgggttacgttacaccgcttgccgctggtgcgtttccgctgacgcgtcgccatgcgttgcagtacgtgcagccagggcttgcgctggtgggcgatgccgcgcataccatccatccgctggcggggcagggagtgaatcttggttatcgtgatgtcgatgccctgattgatgttctggtcaacgcccgcagctacggcgaagcgtgggccagttatcctgtcctcaagcgttaccagatgcggcgcatggcggataacttcattatgcaaagcggtatggatctgttttatgccggattcagcaataatctgccaccactgcgttttatgcgtaatctcgggttaatggcggcggagcgtgctggcgtgttgaaacgtcaggcgctgaaatatgcgttagggttgtaaccttacaacattgccggatgcgtgccaaccgtaggtcggataagacgcggcagcgtcgcatccgacattgaaggataagacgtgtcaacatcgcattcgacattgaatgaacgcagaaaagcaaaaagctcgccgaagcgagcttttttaatgtggctggggtacgaggattcgaacctcggaatgccggaatcagaatccggtgccttaccgcttggcgataccccaactgggtgcacttacaaggtaagcgtcttgaataaattggctggggtacgaggattcgaacctcggaatgccggaatcagaatccggtgccttaccgcttggcgataccccaacaaattggttttgaatttgccgaacatattcgatacattcagaatttggtggctacgacgggattcgaacctgtgaccccatcattatgagtgatgtgctctaaccaactgagctacgtagccagattgtttcttcgatggctggggtacctggattcgaaccagggaatgccggtatcaaaaaccggtgccttaccgcttggcgataccccaataaccgggcggtgaaccgcttactcgaagaagatggctggggtacctggattcgaaccagggaatgccggtatcaaaaaccggtgccttaccgcttggcgataccccatccgtacaacgctttctggtgaatggtgcgggaggcgagacttgaactcgcacaccttgcggcgccagaacctaaatctggtgcgtctaccaatttcgccactcccgcaaaaaaagatggtggctacgacgggattcgaacctgtgaccccatcattatgagtgatgtgctctaaccaactgagctacgtagccatcttttttttcgcgataccttatcggcgttgcggggcgcattatgcgtatagagccttgcagcgtcaacctctttttcaaggaaaattgctcgaaagtgactgtttggttaggttgcgaacagcgtggcgctatattcgtcaattattgtttactttgtgttttttcccaccctacagccattcttttgtcatacaggatgaaattcggaatttaacaatagtggtgggaaattaatctatgaaatactggcctacagtgatgagttgtcaaacagtgatgtggcaaacccggaacatttccttactgcatatcagaatcaacaagcacctcaataactgaaacagccccggatttcaccggggctgtttcgcatttcttacttatacgcgctctggtgaacaccaaccgcgcgaccagacggatcgtccattttcttgaacgcttcatcccattcgatcgctttagcggaagaacaagcgacggaaggaccgcccggcacgcactcagcggcgctcggaagcgggaatagttcttcaaagatctcccgatacaagtacgcttctttagaggttggcgtgttgtacgggaagcggaagcgggcagtttccagttgctgatcagaaacctgctgcgcagccacttctttcagggtgtcgatccaactgtaaccgacgccatcggagaactgctctttctgccgccaggccacgcttgcaggcagatacgcttcaaaacattcacgcaggatgtgtttttccattttgccgttaccgcacattttatcctgtgggttaatacgcatcgccacatcaaggaattttttgtcgaggaacggaacgcgtgcttccacgccccaggcactcatcgctttgttggcacgcgcgcagtcatacatatgcagggccagcagtttacgcaccgtctcttcatgcagttctttggcattcggtgctttgtggaagtaaagataaccgccgaacacttcatcagaaccttcaccggacagcaccattttaatgcccatcgccttgatcttacggctcattaaatacatcggtgtactagcgcgaatagtggtcacatcataagtttcgatgtggtaaatcacgtcgcggatggcatccagaccttcctgtacagtgaagtgaatttcgtgatgcaccgtgcccagatggtttgccacttcctgggctgctttcagatccggactacccggcagacctacagcaaaggagtgtaactgcggccaccaggcttcagagcgttcctgatcttccacgcgacgggctgcgtatttcttggtgatagcggaaataatactggaatccagaccaccagaaagcagcacaccgtaaggcacatcagacatcagatggcttttaacactatcttccagtgcctgacgcagctcgtttttgtcggtcacgttatctttcaccgcatcgtagtcgaaccagtcgcgatgatagtaagaacggatttcgccgtcctggctccacaaatagctccccgccgggaactctttaatcgtgcggcaaactggcaccagcgctttcatttcactggccacatacagctgaccgtgttcgtcataccccatatacagtgggatgatccccagatggtcgcgaccaatcaggtaggcatctttttcgctgtcgtacagtgcaaaggcaaacatgccctgcaagtcgtcgagaaattccggccctttttcctgatacagcgcgaggatcacttcacagtcagacccggtctggaactggtaacgatcgccatattcggcgcgcaatgcctggtggttgtagatttcaccgtttaccgccagtacgtgggttttttgttggttgtagagaggttgcgcccccgcgttaacgtcaacaatactcagacgttcgtgggcgagaatggcgttatcgctggcataaataccggaccagtccgggccacgatgacgcatcaggcgactcagctcgagggctttcttacgcagctcaactgcgtctgttttgatatcgaatacgccaaaaatactacacataaccttctccgttaacctggtatttgttgcttgttgtgtttgcttgtttaaaaaaatgccgcaaagcagcactgtgcgcaagcgatttggcggtgaaaaaataaaaaacgtaatggtgattgtcgattggtgaaaaaaggtctggtgtgaggatatatttattgatgaatcgataatttttagcgggttttattgaatgtttatattttacgggggccaaattgctgacaaagtgcgatttgttcatgccggatgcggcgtgaacgccttatccggcctacaaaagcatgaaaattcaatatattgcaggagctgcgtaggcctgataagcgtagcgcatcaggcagtttggcgtttgtcatcagagccaaccacgtccgcagacgtggttgctattcagataacgtcgatttcagcgacactcgggtaaatccagctggggcggaaaggcatactgtcgatatcgtcgaggctgctaacaccagaaagcaccagaatcgtctccagacctgcctggaagccggccagaatatcggtacgcaggttatcgccgacaatcaccgtttcttcgctatgcgcctgcattttgtttaatgctgcgcggatgatccacgggctgggcttaccaacatagaacggtttgcgcccggagattttctcaatccctgcacacaacgcgccacaagcgggataaaaaccgcgcccgtgggtgtccggattggtggcgataaaacgtgcaccgttagcgacgaaataggctgctttatgcatcatgtcccagttgtaggaacgcgtttcgccaacaatcacgaaatcagggttcacatcggtaatagtgaaaccggctttgtacagttcatgaatcagtgcgccttcgcccaccacatacgctttcttgccttcctggcgacgcaggaaatcggcagtcgccatcgcagaggtataaaacacgctgtcaggtacatcgacacctgcggtggcaaagcggttcgccagatcttgcccagtctggctaggatagttggtcagcaacaccagcggcaggcctttatccataatcccgtgcaaaaattccgctgcacccggtacggcgacgttatcgtgcatcagcacgccgtcgatatcgcaaattacatttttaatggtcatggactacccagaatattgacaacaataagcgccactataaaagcacattaattttccagcaaatgctggagcaaaataccgttgagcatggcgcgttttaccagcgcaaaagcgccgattgcgctgcggtgatccagctcagaacgtaccaccggcagattagtgcgaaacgccttcagcgcctgggtattaatgcagctttcaatagcagggagcagcactttatcggcttcggtgatttcaccggcaataacaattttttgcggattaaataagttgatagcaatggcgatggttttacccagatgacgaccgacatactcaattacttcgctcgccagactatcgcctttgttcgcggctttgcagatagttttgatggtgcagtcgtccagcggcacgcggctctggtagccctgctttaacagattcaacacccgttgttcaatggcagcgttggcagcgatagtttccaggcagccaaagttgccgcagtggcagcgttcacccagcggttcgacctgaatatggccaatttcaccgacgttgccgttgcggccaataaaaatgcgcccgttagagataatcccggccccggttccgcgatggacacgcaccagaatggagtcttcgcaatcctgacttgcaccgaagtagtgctccgccagcgccagactacggatatcgtgaccaacgaaacaggtcactttaaaacgttcttccagagcttctaccagcccccagttttctacctgaatatgcggcatgtaatgaattttgccgctgtccgggtcaacaagccctggcaggatcacgctaatcgcgatcagctcgcgcagtttgcgctggtagctatcaataaactgagcaatggcattcaacagggcatgttccagcgtttgctgggtacgttccggcagcgggtaatgttcttctgccagcactttgctgctgagatcaaacagagtgatggtggcgtcatgacgaccaagccgtacgccgattgcgtggaaattgcgggtttcggtgacgatggagatagcgcggcggcccccggtggaggcctgctgatcaacttctttgatcagcccgcgttcgataagctgacgcgtaattttggttacgctggcgggggcaagctggctttgctcggcaatctgaatccggctgattggcccgtactggtcaatcaggcgataaaccgccgcgctgttaagctgttttacgagatcaacattacctatctgagcttgtccgcctggtgtcatactttctcttattgagttacgacctcgttaccgttaacgatggtcttggtgattttaaaatcaggtgtgaatgcagtcaggttggctactttacctgcggcgagtgtgccgagacgtttctcaacgccaatcgcacgcgccggatagagcgtcgccatacgtagcacttcatccagtgcgataccgcaatgttcgaccagattacgcacgccttcaatcatggttaaggaactaccgcttaacgtaccgttctcatccacacaaagtccgttacggtagtatattgttttacccgcaaaaatgaactgttcaatgttggcacctgctggcgcggtggcgtcagtaaccagacacagtttgtcgcctttcagacgtttagcgttgcgaatgttggcgtaatcaacatgcaggccatcagcaataataccgcaataaatgtcagcttcgtcgaggatcgcgcccgccaggccaggttcacgaccggtaatatacggcatcgcgttgtacagatgggtggcaaaggtaatccccgcgcggaaaccggcttttgcttctttcaacgtcgcgttggagtgaccggcagaaaccacaatcccggcatttgccagtttgctgatgacttccgcaggaaccatttccggtgccagggtcactttggtaatgacgtcggcgttttcacacaggaaatcgaccagcgcggcatcaggcttacgcacaaaattcggattatggatgcctttttttaccagattcagccacggaccttccagatgcagacctaacgcctgattcggatgttttgccaggtactcgcgcataacgcgcacgccctgtttcatcagctcatcgctggtggtgataagcgtcggcagatagttagtacagccacttttctcattggctttctgcatgatttccagcgtttccacgctgaccgcttcagcggtgtcgttaaactgtacgccgccgcagccgtttaactgcacatcgataaaaccgggggagagaatggccccgttcagactacgttgttcgatctctggcggcagttccgctaccggacagacgcttttaatcaggccatcagcgataacaaccgcgtggtcatcaagaaattcgtggccggtaaagatccggccctgggttaatgcatacattctgacccccgattttaaaaaatattgccctgagcaaggagccagggcagggataacaattacagacctttgatattttctgcttctaattcattgaaatatcttaaagtcttaactttcagctccatggtggaaggttcatcgcacaccatgatcgctttcggatgcagttgcagacagctgatggtccacatatggttcacgcaaccttcaacggcggcctgcagcgccagtgctttctggctacccagcaccagaatcatcacttcttcggcatccagcagtgtaccaacaccgacagtcagggcatattttggcacctgattaacatcgttatcaaagaaacgagagtttgcgacgcgagtgtcatgagtcagggttttgatacgagtacgagaagccagagaagacgccggttcgttaaatgcaatatgaccgtcgttacctacaccgcccataaacagatgaatttttccgtaagaacggattttttcttcatactggcggcactcggcgtcgatatccggggcgttgccgttgagaaggttgatgttttctgctggaatatcaacgtgatcgaagaaattacggtgcataaagctgtagtagctttccggatgctctttcggcagaccgacatattcgtccatgttgaaggtgacaacgtgcttaaagctgacctggcctgctttatgcatttcgactaacgctttataggtggtcatcggcgtgccgccagtcggcaggcccagtacaaacggacgatcggcagtcggtttgaacgcattgatacgattgacgatatggcgagcagcccatttgccgacctgttcagcggtagtcagggggatcagtctcattattcacctcaataagtaaaatgtaagccgttggcggattaggcatctttaagcgtaacctggatttgcgcagacaggcgtcaatccgacctgattttttgaatgataaaataagttttctggtttagccagtaaaagggagtgataataacgatatttggtgacaaaactcacaaaagacacgcgtttaatttgcgatacgaattaaattttcacacactctgtagcagatgatctaacaatctgattacagaacatcggcagtacaatttgcagcaaaataaaaatacggcttgaaacgagccaaatagggttctcgtagggggaataagatgaatattttaggttttttccagcgactcggtagggcgttacagctccctatcgcggtgctgccggtggcggcactgttgctgcgattcggtcagccagatttacttaacgttgcgtttattgcccaggcgggcggtgcgatttttgataacctcgcattaatcttcgccatcggtgtggcatccagctggagcaaagacagcgctggtgcggcggcgctggcgggtgcggtaggttactttgtgttaaccaaagcgatggtgaccatcaacccagaaattaacatgggtgtactggcgggtatcattaccggtctggttggtggcgcagcctataaccgttggtccgatattaaactgccggacttcctgagcttcttcggcggcaaacgctttgtgccgattgccaccggattcttctgcctggtgctggcggccatttttggttacgtctggccgccggtacagcacgctatccatgcaggcggcgagtggatcgtttctgcgggcgcgctgggttccggtatctttggtttcatcaaccgtctgctgatcccaaccggtctgcatcaggtactgaacaccatcgcctggttccagattggtgaattcaccaacgcggcgggtacggttttccacggtgacattaaccgcttctatgccggtgacggcaccgcggggatgttcatgtccggcttcttcccgatcatgatgttcggtctgccgggtgcggcgctggcgatgtacttcgcagcaccgaaagagcgtcgtccgatggttggcggtatgctgctttctgttgctgttactgcgttcctgaccggtgtgactgagccgctggaattcctgttcatgttccttgctccgctgctgtacctcctgcacgcactgctgaccggtatcagcctgtttgtggcaacgctgctgggtatccacgcgggcttctctttctctgcgggggctatcgactacgcgttgatgtataacctgccggccgccagccagaacgtctggatgctgctggtgatgggcgttatcttcttcgctatctacttcgtggtgttcagtttggttatccgcatgttcaacctgaaaacgccgggtcgtgaagataaagaagacgagatcgttactgaagaagccaacagcaacactgaagaaggtctgactcaactggcaaccaactatattgctgcggttggcggcactgacaacctgaaagcgattgacgcctgtatcacccgtctgcgccttacagtggctgactctgcccgcgttaacgatacgatgtgtaaacgtctgggtgcttctggggtagtgaaactgaacaaacagactattcaggtgattgttggcgcgaaagcagaatccatcggcgatgcgatgaagaaagtcgttgcccgtggtccggtagccgctgcgagtgctgaagcaactccggcaactgccgcgcctgtagcaaaaccgcaggctgtaccaaacgcggtatctatcgcggagctggtaagcccgattaccggtgatgtcgtggcactggatcaggttcctgacgaagcattcgccagcaaagcggtgggtgacggtgtggcggtgaaaccgacagataaaatcgtcgtaagtccagccgcagggacaatcgtgaaaatcttcaacaccaaccacgcgttctgcctggaaaccgaaaaaggcgcggagatcgtcgtccatatgggtatcgacaccgtagcgctggaaggtaaaggctttaaacgtctggtggaagagggtgcgcaggtaagcgcagggcaaccgattctggaaatggatctggattacctgaacgctaacgcccgcagcatgattagcccggtggtttgcagcaatatcgacgatttcagtggcttgatcattaaagctcagggccatattgtggcgggtcaaacaccgctgtatgaaatcaaaaagtaatctgctttatgcctgatgcgacgcttgagcgtcgcatccaacaatgacaagcggtggagatcttctctgccgctttttttttcatcaatcatccccataatccttgttagattatcaattttaaaaaactaacagttgtcagcctgtcccgcttataagatcatacgccgttatacgttgtttacgctttgaggaatccacgatgagtgaggcagaagcccgcccgactaactttatccgtcagatcatcgatgaagatctggccagtggtaagcacaccacagtacacacccgtttcccgccggagccgaatggctatctgcatattggccatgcgaaatctatctgcctgaacttcgggatcgcccaggactataaaggccagtgcaacctgcgtttcgacgacactaacccggtaaaagaagatatcgagtatgttgagagcatcaaaaacgacgtagagtggttaggttttcactggtctggtaacgtccgttactcctccgattattttgatcagctccacgcctatgcgatcgaactgatcaataaaggcctggcgtacgttgatgaactgacgccggaacagatccgcgaataccgcggcaccctgacgcaaccgggtaaaaacagcccgtaccgcgaccgcagcgttgaagagaacctggcgctgttcgaaaaaatgcgtgccggtggttttgaagaaggtaaagcctgcctgcgtgcgaaaatcgacatggctagtccgtttatcgtgatgcgcgatccggtgctgtaccgtattaaatttgctgaacaccaccagactggcaacaagtggtgcatctacccgatgtacgacttcacccactgcatcagcgatgccctggaaggtattacgcactctctgtgtacgcttgagttccaggacaaccgtcgtctgtacgactgggtactggacaacatcacgattcctgttcacccgcgccagtatgagttcagccgcctgaatctggaatacaccgtgatgtccaagcgtaagttgaacctgctggtgaccgacaagcacgttgaaggctgggatgacccgcgtatgccgaccatttccggtctgcgtcgtcgtggttacactgcggcttctattcgtgagttctgcaaacgcatcggcgtgaccaagcaggacaacaccattgagatggcgagcctggaatcctgcatccgtgaagatctcaacgaaaatgcgccgcgcgcaatggcggttatcgatccggtgaaactggttatcgaaaactatcagggcgaaggcgaaatggttaccatgccgaaccatccgaacaaaccggaaatgggcagccgtcaggtgccgtttagcggtgagatttggattgatcgcgccgatttccgcgaagaagctaacaagcagtacaaacgtctggtgctgggtaaagaagtgcgtctgcgtaatgcttatgtgattaaggcagaacgcgtcgagaaagatgccgaaggtaatatcaccaccatcttctgtacttatgacgccgataccttaagcaaagatccggcagatggtcgtaaagtcaaaggtgttattcactgggtgagcgcggcacatgcgctgccggttgaaatccgtttgtatgaccgtctgttcagcgtgcctaacccaggtgctgcggatgatttcctgagcgtgattaacccggaaagcctggtgatcaaacagggctttgctgaaccgagcctgaaagatgcggttgcgggtaaagcattccagtttgagcgtgaaggttacttctgcctcgatagccgccattctacggcggaaaaaccggtatttaaccgcaccgttgggctgcgtgatacctgggcgaaagtaggcgagtaattttaagtttcgctatgccggatggggcgtttacgtcgcatccggcaaggaacagacaaacagtttcaaacgctaaattgcctgatgcgctacgcttatcaggcctacatgatctctgcaatatattgagtttgcgtgcttttgtaggccggataaggcgttcacgccgcatccggcaagaaacagcaaacaatccaaaacgccgcgttcagcggcgttttttctgcttttcttcgcgaattaattccgcttcgcaatttatccataaaataaatttaaaataacaaaacataattaaataaaatgtaaccgctttcatcttgctggaatttcacgcttttattcttctgcaagcctttcaaccgcaaacttaagccttgtaacaaaaatcatcaaaatatgtgcggttgctcatgttcttacattctggttacagaaagagattgataattcgcgtcgcgaaaaatagtctgttcctgtagtcagcgagacttttctcaacgctacttttttaatttttattttttcgctgttcacctttggtgcagcaatttatacgtcaaagaggattaacccatgcgtacgtttagtggcaaacgtagtacgctggcgctggctatcgccggtgttacagcaatgagcggctttatggcaatgccggaggctcgcgccgaaggattcatcgacgatagtaccttaaccggcggtatctattactggcagcgtgaacgcgaccgtaaagatgttaccgacggcgacaaatacaaaaccaacctttctcactccacctggaatgccaacctcgattttcagtccggttatgctgctgatatgttcggccttgatattgctgcgtttacggcgattgaaatggcggaaaacggcgacagctcccacccgaacgaaatcgcgtttagtaaaagtaataaagcctatgacgaagactggtccggcgacaaaagcggtataagcctgtataaagctgcggccaaatttaaatacggtccggtttgggcgagggcaggttacattcagccaactggtcaaacgctgttagcgccgcactggagctttatgccaggtacttatcagggggcggaagccggggcgaattttgattacggcgatgctggtgcgttgagtttctcctacatgtggaccaacgaatacaaagcgccgtggcatctggaaatggatgagttttatcagaacgataaaaccaccaaagttgattatctgcactcctttggggcgaaatacgacttcaaaaataacttcgtactggaagcggcatttggtcaggcggaagggtatatcgatcaatattttgccaaagccagctacaaatttgatatcgccggtagcccgttaaccaccagctaccagttctacggtacccgagataaagttgacgatcgcagcgtcaacgacctttatgacggcaccgcctggctgcaagcgttgacctttggttaccgggcggctgacgtagtggatttgcgcctcgaaggcacctgggttaaggctgacggtcagcagggatacttcctgcaacgtatgactccaacctacgcttccagtaacggtcgcctggatatctggtgggataaccgttctgacttcaacgccaacggcgaaaaagcggtcttcttcggtgcgatgtatgacctgaaaaactggaatcttccaggcttcgccatcggcgcttcctacgtttacgcatgggatgctaaacctgcgacctggcagagcaatccggatgcgtactacgacaaaaaccggactattgaagagtctgcctacagcctggatgcggtctataccattcaggacggtcgcgccaaaggcacgatgttcaaactgcatttcaccgaatacgacaaccactccgacatcccaagctggggcggtggttacggcaacatcttccaggatgagcgtgacgtgaaatttatggtaatcgcaccattcaccatcttctgatgcccgacgcggcaggttttgtgcctgccgcacgtttgaggaatttgctatgaaaaaactgattctcatcgccataatggcaagcgggctggtagcttgtgcgcaaagtaccgcgccacaggaagacagtcgtctgaaagaggcatacagcgcctgtatcaacaccgcacaaggtagcccagaaaaaattgaagcctgccagagcgtgttaaacgtgctgaagaaagagaaacaacatcagcagtttgccgaccaggaaagtgtacgcgtactggattatcagcagtgtctgcgtgcaacgcaaaccggaaatgatcaggcggtgaaagccgattgtgataaagtctggcaggaaatacgcagtaataacaaataagtgagagctgtaactctcgcttttcttatttcccttgcataaaaaagccaacccgcaggttggcttttctcgttcaggctggcttatttgccttcgtgcgcatgttcatcttcgcggcaatcgccttcggcacagtgaccgtaaagatagagactgtggttagtcaggcgaatgccatgttttgcggcaatttcacgctgacgcgcttcgatggaatcatcactaaattcgataaccttgccgcagtcgaggcagatcaggtgatcgtggtgatgttgctgtgtcagttcaaatacggatttaccgccttcaaaattgtggcgggtgacgataccagcgtcgtcaaactggttcagtacgcgatataccgtagccagaccaatttcttcacccatatcgatcagacgtttgtataaatcttccgcactgacgtgatggttgtccggctcctgaagaacttccaggatttttaaacgaggaagcgttactttcaggccagctttctttagggcggtattgttatcagtcatgcggaatctgtcctgttactaagcggttcacttcattagaagaagtgacagaatttgctcttgagataatgcgtatcattatagaattgccacgcctaaatgaaaaccacaagtccctggcaaatattgttaataaaaacgtggcacagcttacatttacaacggcaaggccacttgaacaccgggacattgtacaggtacaacagcaaaagttacaaatttgtagcaattattttgattggcattatctattaatacggcgtagacatgagtctacgccgcatcacatcaggcattgagaatttcgtcgagatgcaactcttcagaaatctgtttaacccatttttctacacgttcagcggtcagttccggctgacggtcttcgtcgatagccagaccgacaaagtggtcgtcatctgccagacctttacttgcttcgaaatgatagcccgcagttggccagtgaccaacgatggttgcaccgcgcggttcaatgatgtcgcggatggtgcccaatgcgtcgcagaaatattcggcgtaatcttcctggtcaccacaaccaaacagcgcaaccagtttgccgttgaaatcaatctcttcgagagtcgggaagaagtcatcccagtcacactgcgcttcgccgtaataccaggttgggatgcccagcagcagaatgtcataagcttccagatcttctttgctgctttttgcaatgtcatggacatcggcaacgtctttaccaagctgtttttgaatcatttttgcgatattttcggtattaccggtgtcgctgccgaaaaagatgccagtgatagccatgagtgaaataacctcttgaaacttattgaaatgggggtggaaaattgcccacggataaaggcaatcatagcagaacaggcagtcttgcggaatcagcaaacgagcaggactgcacactgtgctacatgaaagtggaaatttaaacgatgccctgactacgcagcgccgccagttgctgcattaacatctcttcgatcagttcgctacggctcatattgcggctctccgccagctcgttcagcgcctcgacagcttccgcgttcagcttcagttcgacacgcttaaggccacgtactttgtcgcgttttagctggttgcgtttattaatacgcagctgttcatcgcggctaagcggattagttttcggtcgtcccggtcgacgctcgtgcgcgaacagatctaatgtcgtacggtccgtttgttctttggccatgatcttggtgacttcgggggaaacaatcagccaggcctctgcccggatggatagcgcgccataatacatcagcgcgatgagtcacgccaacgcccacgcgcggaaagcgacgcggacgctgggtttttaatcagttgcgttaatcattgagatagcgacggatagcgcgtaataccgcatccggtttttcagcatggacccagtgacccgcgcctgcaatcacatgcgcccgtgcctgtggaaattgagccagtaaatcatcacggtactgctcgctaacatacggagaattgccgccagggataaacagggcagggtgatcccatgccgggattttctcccaacctacaatatgcggatactgatcccacaataccggcacgttaaagcgccactccccgtcaacaaaagatttcagcagaaactgaatcaccccttcttcattaagatgctggcgcattattgctgctgcttgctggcgagtttgtgcgtcgctttcactgaccgcgttgatagccgcaaaaatctcatcatgacggcgtacgtgatagtcgaccggcgcgatatcgatcgccaccagtttatcgatgcgatcggaggctagtgcagtaagtgccattaccgctttaccgcccatggagtgaccgataaatgttgctttgtcgatctgctgtgcatccagagtatcaacaagatcctgcgccatcgccgggtaattcattaccggatctctcggactaagaccgtggttacgcatatcaacctggatgatattgtgatcgtttaccagatcgcgagccagtacgccaaggttgtcgaggctgccaaacagaccgtggacaagaacgatgggagaattattgtgctggttttgtgcagtttgcgcgcggatattcaatttcatggcaaagttctttttttcgcgttgtcgggttagggtattatgttgaccattgtgccacagggctgcaacaaataaggtttattccgagtttttctgcaagccaggcttgacgctatccgctgccgggatttattcatatactcctggcgacttgtattcagctaagacactgcactggattaagatgaaaacgattgaagttgatgatgaactctacagctatattgccagccacactaagcatatcggcgagagcgcatccgacattttacggcgtatgttgaaattttccgccgcaagtcagcctgctgctccggtgacgaaagaggttcgcgttgcgagtcctgctatcgtcgaagcgaagccggtcaaaacgattaaagacaaggttcgcgcaatgcgtgaacttctgcttagcgatgaatacgcagagcaaaagcgagcggtcaatcgctttatgctgctgttgtctacactatattctcttgacgcccaggcgtttgccgaagcaacggaaagcttgcacggtcgtacacgcgtttactttgcggcagatgaacaaacgctgctgaaaaatggtaatcagaccaagccgaaacatgtgccaggcacgccgtattgggtgatcaccaacaccaacaccggccgtaaatgcagcatgatcgaacacatcatgcagagcatgcaattcccggcggaattgattgagaaggtttgcggaactatctaaaacgttgcagacaaaggacaaagcaatggcaatccacaatcgtgcaggccaacctgcacaacagagtgatttgattaacgtcgcccaactgacggcgcaatattatgtactgaaaccagaagcagggaatgcggagcacgcggtgaaattcggtacttccggtcaccgtggcagtgcagcgcgccacagctttaacgagccgcacattctggcgatcgctcaggcaattgctgaagaacgtgcgaaaaacggcatcactggcccttgctatgtgggtaaagatactcacgccctgtccgaacctgcattcatttccgttctggaagtgctggcagcgaacggcgttgatgtcattgtgcaggaaaacaatggcttcaccccgacgcctgccgtttccaatgccatcctggttcacaataaaaaaggtggcccgctggcagacggtatcgtgattacaccgtcccataacccgccggaagatggtggaatcaaatacaatccgccaaatggtggcccggctgataccaacgtcactaaagtggtggaagacagggccaacgcactgctggccgatggcctgaaaggcgtgaagcgtatctccctcgacgaagcgatggcatccggtcatgtgaaagagcaggatctggtgcagccgttcgtggaaggtctggccgatatcgttgatatggccgcgattcagaaagcgggcctgacgctgggcgttgatccgctgggcggttccggtatcgaatactggaagcgtattggcgagtattacaacctcaacctgactatcgttaacgatcaggtcgatcaaaccttccgctttatgcaccttgataaagacggcgcgatccgtatggactgctcctccgagtgtgcgatggcgggcctgctggcactgcgtgataagttcgatctggcgtttgctaacgacccggattatgaccgtcacggtatcgtcactccggcaggtttgatgaatccgaaccactacctggcggtggcaatcaattacctgttccagcatcgtccgcagtggggcaaagatgttgccgtcggtaaaacgctggttagttctgcgatgatcgaccgtgtggtcaacgacttgggccgtaaactggtagaagtcccggtaggtttcaaatggtttgtcgatggtctgttcgacggcagcttcggctttggcggcgaagagagtgcaggggcttccttcctgcgtttcgacggcacgccgtggtccaccgacaaagacggcatcatcatgtgtctgctggcggcggaaatcaccgctgtcaccggtaagaacccgcaggaacactacaacgaactggcaaaacgctttggtgcgccgagctacaaccgtttgcaggcagctgcgacttccgcacaaaaagcggcgctgtctaagctgtctccggaaatggtgagcgccagcaccctggcaggtgacccgatcaccgcgcgcctgactgctgctccgggcaacggtgcttctattggcggtctgaaagtgatgactgacaacggctggttcgccgcgcgtccgagtggcacggaagacgcatataagatctactgcgaaagcttcctcggtgaagaacatcgcaagcagattgagaaagaagcggttgagattgttagcgaagttctgaaaaacgcgtaaacacatttaataaaaaaagggcggtcgcaagatcgcccttttttacgtatgacaaacacagaattgcctgatgcgctacgcttatcaggcctacgaggatggtgcaatatattgaatttaagcgattttgtaggccggataaggcgttcacgccgcatccggcaaaaacaacgaacactttgtcaacaaactgagtagctcaaggaaatcccaatgaagaccaacaggagtctggtcgtcatagtgagtctaattaccgccacattactgctgactgcatgcgcccaacctgaacaaagtagtttagctggcgactggttactgacccctaaagataaaaccagaggattaacgggtagcattgcggtaaatattgcacctttccggtgtaagacaaattgccgtggtgataacttacctgataatacccgccgctggcagttgagtggcgggaacgaaaaagaacttacttatcttcataatatgagtgcacaagaaaaggtcggtttaaatcccggttggcaatgctacaccagtttttttatgcgggtttgccagggcaagcccggcactcgaccgatagtcaatgaggattatgtcagcgaaagcggattttttggcagcatgatgcatgtcgggattattgagttacgacgctgccagagtgaaaattgccagcaagaattgaaagcgataaatacacattaaaatagtgagtccgggaatgaaacccggacctgaacatgtcttattgcgtgaatgtttctttcatttgatactgcatttcccagagttcagtaaggctaataacttttcttgttcttgcttcttcactttgtacccataagaaagggtagaacgtgaaggcttccgttgcgcttaattttattacgtcttctcgccattgctgccatcgtacattttcatagaaggtatctaaatcaccggataatgcccactgaagaaactcagaatatccaacttccagactttcccaattcagcgtatctggcgcaaaataataaacgcagccagtatcttccccaagatcgccaccattaagagcaaaaattacccctgcgacatcgtcagcgatgggtaaagcccgcacgcctgcgaattcagggcgttgtgtccaacttactggatctcgtggcaaccgggggtgaccagatcctgctatgcgtaattaaccattatcaatcagcagacctccggagccatagacaagcgcacccatcggactttttgttgtcacctgtaattgataaagtgcggtttcggctaaatctttattaaccggtaagagttcggtatggtttgtggcgtcttttaaccagttctggattattggccaggcactatcttcagtatttactaactgattcatttcacgcatcgctacttgctccttgtgtgctacggtgtcatttatgatgaggaattgtatggaacattttttaaatattaagttccttatatttgaataaaaaatgactttatccatacattgccacttttttcaaagcataaaccgatacccaataccggtttcagtaataaaatggcgaggccgggccggatcctgttccagtttttgtcgcagatgccccatataattacgcaaatagttgctgtgttcgatcgcgtttagaccctacatctgccggatgcggcataaataacgaactatttgccaacaaacagaaagggcgatcattcaatcgcccttttttactttgttttattaaccgtgtttatttttcagttcaaagcgtggacttaccagaccatacagtgtccaaccaaggaaggtcacgatggaaccgtacagcatggcttcttccccggaactgtacagcgcataaaagctatacatcgcgccaacaaaagcaacaaagtttgcaactttcgctttactggggggcacattagcgaccttctgaataatgactaatgccgccatactcagaatatacggaatgatattggtcaccacggccaggttaaccagcacgttgaactgactgtttaggctcgggctaatggtcatcagtgccaatccactctgaataatcacaatggtcaacattccctgcaccggtgcatccactttggttacacgggagaaaattttagggaagtagccttcatcagaactagatttaaacacctgggcaatggtgaactgccagccaagtaggctaccgcagcaggacatcaccatcagcgccataatgactttacccacttccggcgtgaacatctgcgcgaaggccagaccaaatggtgccgtactatttgccagctccatatttggcacaatcccggcaatcacgttggtggagacgatataaatcaccgccgcacctaacgtaccgccgagtaccgcgattggcacattacgttccgggttttccactacatcagtattcgcacacgcagactccagaccaagaaaagcccacagcgtcatagcgatggaagaacctaccgcactgaagaacggtgcatgatgcggattccaggaatcaacgtacagcgtcgggctaaaccagaaccagccaataatgcacagaccgacgaccggaataatgaccccccacacggtaatgctactgatttgcccggtaatgcgcgcaccaccaaagttagccacggtacaaatccacagcaccccgatggtcgcaagaccaatctgcactgggctcaaactcgcgccgagcagttcggtgccgtaaccaaccgcgctaatagcaatcgcgacgttagcaatcagcagactgacgccgtaggtatagttcgccataaagttaccggatttaccgaaagcatactcggcataaccgcccataccgccacttttacggctgaacataccgcattttgcgaatgcccatgccagtgccatactgcctacggctgtcaccagccaggagataatactgattgtcccgacttcggcaagctttgtcggcagcatgatgataccggagcccatcatgttgaccatcgtcagtatggttaactgaacgacgcccattttgttgcttttagcctgactcataatttttcccctttcaacagggtgctttgcgcatcacgaggcttgatgacatagcaccaaacttgcttacgaccatcatgttcttcgatatagacaccctgcagctccggtgcaaaacctggcagcaggttgatcccttcttccagagcgctgaagtaacgcagaacagcaccaccccagatttcacccggaacaacacacagcacacccggaggataaggaagcgcaccttcggcagcgatacggccttctgcatccggcagacgaaccagttccacttcaccgcgtaaataggcgtagttggcttcttgcggattcatgctgacgcgtgggaagtgctccttacggaacatctctttttgcagttgtttcacgttgtggcgggcatacaaatcatgcatttcctgacacaactgacgcagggtataaccggcgtagcgctcttcatgctgtttgtagatggaaggtagcacttctgctaatggcgcgtcggactcaagcagtttttcgaagcgtaccagcagggcaacaagttgctgaagtttggccatatcttctgccggagtcagcaggaagaggatggagttaagatcgcatttttccggcactacgccattttcgcgcaggaagttagcaagaatcgtcgcgggtacaccgaacgcttcatattcgccgttacgtgcatcaatacctggggttgtcagcaacagtttgcatggatcgacaaagtattgattctctgcatagccttcaaaagaatgccagtgttcccctggtacaaactggaagaagcgcagatcaaccgcaatttgcgctgtttcatagctctgccagggtttaccatccaccagttcaggtacgaacggacgaatatgctgacagttatcgaggatcagtttgcgggcattaatgccatttaccacacaatccatccacatattacgaccgctgacaccttcatgcattttggcgttgatattcagtgcggcaaacagcggatagaacgggctggtggaggcgtgcatcataaaggcgttgttcatgcgtttgtgcggtacataacgctgttgccctttgatgtggctgtcttttttatgaatttgactagtctgagaaaaaccagcctgttgtttatgcacagattgcgtaaccagaatacccggatcgttctcattaagatccagcaacagcgggctacagtccgccatcatcggaataaactgttcatagccgacccatgcactgtcaaacaggatgtagtcacacagatgaccaattttatccaccacttggcgggcgttataaatcgtaccgtcgtaggtgcctaactgaatcacagcgaggcggaaaggacgagcctcttttgcccgctgcggtgcgacttccgcgatcagctcacgcaggtaactttcttcaaaacagtgcgcatcaatgccaccgataaagccatacgggttacgtgccgtttccagataaaccggtgttgcaccagcctgtagcaacgctccgtggtggttagatttgtggttattgcgatcaaacagcaccagatcacccggtgttagcagggcgtttaaaaccactttgttagaagaactagtgccatttaaaacgaagtaggttttatcggcattaaacacttttgccgcatgttgctgtgcaatgcatggcgcgccttcgtgaatcagcagatcgcccatcgctacgtcggcgttgcacaagtcggcacggaacagcgcctcaccaaagtattccacaaactgattccccgccggatggcgacggaaaaattcgccgccctgatgaccagggcaatcaaacgcgctgttaccttgattgacataatcgaccagtgcgcggaagaaaggtgggcgcagttgagtttcataatggctggcagcggtttctaactggcgaccataaaattctcgtcggctttcgcaattctcaaagacaccgctaatacggggcaaatactctgcgggtacacgttcttgattttcagtagcaataaataccgggatgccataacccgtggcatcgatttcatcgagttttccgcatgtaacatcgttgaggcttaaaactattgccgccacatcgatattacgactttcattaatgtagatacattctcgctgcgtggtaaaacagtccgggcaagaatcactaaccgcaatttttaatttactcatttttcatctctttattttaggtaatagcaggtcctcaatttctcgaatgagaaatcgatcgtgccggaaaaaagcaaagttaccccgctgataaataaatcaggtagattgcttttttcagaatgcagaaacccttaccagtcaggtggctgataatacaagggttaacagagaatgagcactgcggaatacaggcatatgcctgtaatacagagagtcaggaagacctgtacgctgaagtgcccttagtcggtagactaacgggcattgaagaagtgaaagtcgaagctattgcgatgagcaaacttcataatatgagttgtccgccttatatggggcatagtgcggctgttattttccatttaatttacctttcctgatgtgaatgaaggtgaagatattctatccaggaaatacggttgaactgtgaaggtgatcaataaaaaatgatcaatcttaatttatttaatgatgagctttttactcagtaatataaaatattgaattgttatttttgtgtgttgtttaagataaaaagccgtatttattattacggctttaattaataaaaggcaggctgtattaaaattaatattcaaagcataaaccgatagccaataccggtttcagtaatgaaatggcgtgggcgggcgggatcctgttccagtttttgtcgcagatgtcccatataaatacgcaaatagtgactgtgttcgaccgcgtttggcccccacacctggttaaggagctggcgctgggtgagtacttttccggcattgttgagcagcaccgccagcaggcggaactcaattggtgtgagatgcacctcttcctcaccccggtgaatcacgcgggcggctaaatcgacggtaacatcggaaaattttaccagcggatcgggcgcggtggtggcagagtggcggcgtaatgcgacgcgcagacgggcctgcaattcgccaatgccaaacggcttactcagataatcatccgctccggcatccagcgcggcgattttgtcgctctcttcgctgcgtgcggaaagcacaatcaccggcaccgcgctccactggcgcaggtcgcggataaactcaatcccatcaccatcgggcaggccgagatcgagaataatcaaatctggcttacgggttgccgcttccagcaagccgcgttgcagcgtttcggcctcaaagacgcgcatcccgtcgccctccagcgccgtgcgcagaaagcgacgaatagcctgttcatcttcaacaatcagaacgtttgtcacatatcctcatgaaattcttcaagttcaggggcagtttgctggggaagtgtaacacgaaaacaggcaccaccttccggtcggttgaacgcggtaatagtgcccccgtgtacatccactatcgcccgacaaattgccagtccaagccctacccccggtactgcgctctctttattcccgcgagcaaacttatcaaatatcgtctgctcctggcctggcggaagaccggggccgttatcccagacatccagttgtagattttcgccctcaacgtgggcatcgataccaatttcggcctgcgcacccgcatatttcaccgcgttctccagcagattaatcagcacccgttcaaagagtggcccgtcaacgtggattaaggtcagcggttctggcagagaaagattgatggggctgcttaaacccggttccagcatttgcagcgcgctgccgactacttcttccagcgttaaccactctttcttcaaattaaagccgccggactgaattcgcgccatatccagtagattattcaccagtcgggtagtgttcagcacatgctgacggatctcgctggcctggcgggcgtggggacttccttcgcttgccagatcgagcgttaagatttctgcctgaccaaacagcaccgtaagcggcgtgcgtaaatcatggctaagcgccgccagcagggcgttgcggatctgttcacgttcgcttgccatccgcgcctgttcttcgctggcggttagcgtcagccgctcaagggcattggcgactaacagcgtaaacgtctccagcaggcgctgctgttccgggatcatcaactggcgcagattccccggctccaccaccaccagcccgtaggttttctcgccgctttttagcggcaaaatctggtacggtacaccgggtaacgtgtcggtgcccgcgcccgcaggcaggcctttatcaaaactccactgcgcgatggcatcgtcccacggcgtcattccttgcggatgtgttaacggctgcaatttaccgttgtcatcgggcaacaacacctgactgcgggcatgaaacgtggaggcaataaattgttcgctggtggcagcgatatcctgcggactgcggcccaccgccagagctttgctcatttcatataagtgccgtgtgcgttgctcgcggtaacgggctacccgcgcctgataacgcacgccagcagtaaggttcccgatcaccagcccgacggttaacatcaccgcgaaggtcagcagatattacacatcagagacggcgagcgtgccgcgtggggcgataaaaaagagatcgaaactcactacattaatgacggtggcaaccacactaggccagcgtccataaaatagcgccaccaccaccacgccaagcagatacagcatcaccaggttggcggcatcaaacgccatcagccactgcatggcaattaaggtgataacggcgcataacgcggcggcaaccacgcatccctgaatttgtacacgccacttgtctttaaaagagcggttatccggcgcgttgttaatcgtgcgggcgggtggttcatcaagcgcgaccagcacctgatcgagatcgggggcgatgcgcgccagtcggtcagcaaacgtttcccgacgccaccagcggcggctggccgggcgaccgagaataatcttgccgagattatgttcacgggcataacgcactaccgctttctcttccgctggatcagaaagtgttgccgtctccgcgcccagttcctgcgccagacgtaaggcgctgagaattgcccgacgttttttttccggtaagcggtgcagggcaggggtttcaacatacaccgcgtgccagacgctacccagccgactcgccagccgcgccgctgcgcggaccagtttttcgctgccggtgttatggccgatgcataaaaggatcgcgtcgcgcgtgcgccacactttctcttcgccaggatgcccccgccaggcgcgcatttgctcatcaacgcgatcggcagtacggcgcagtgccagttcgcgcagggcgatcagattacctttgcggaaaaaatgttcaatggcgcgctccgcctgcccggcaatatagactttgccttctttcagccgctggcgcagatcgtccgggggcaagtccaccagcaccacgtcgtcggcggcatcgaaaaaaggatcgggcacggtttcccgtacctgaattccggtgacgccgctgaccacatcattcagactttccagatgctgaacgttgacggtagtgaaaacatcaatgccagcttccagcagttcttcgatatcctgccagcgtttgggatgacgggaacctggcgcattactgtgcgccagttcgtccattaagatcagcgccgggcggcgggcgagggcggcatcgagatcaaactcgctgatatgccgcccacggtacgcctggcgttttaacggcagaacagccagcccttccagcatggcggcggtatcttttcgcccgtgggtttctaccacgccaaccacaatatccagcccttgcgcccgcagtcgctgggcttctgccagcatcgcccaggtcttcccgacgcctgcacaggcaccgaagaaaactttcagcttcccccgatgcggcgcggcagtttgttccagcagacgatcggggtcgggacgtaagggttcgttattcatcaagtttatccagcgccagattgagttcaacaatgttgacaaccggctggccgatatatttcaccagcggttgttggctgtattttgcgatcagttgcgtgagctgttcaacgctgagattacgcgctttcgccacgcgtgggatttgccaggccgccgcttgcggggtgatattattgtccagcccgcttgcgcttgccgtcaccagttcaaccggaacgctcgcgctggcatccgggttagcggcccgtaatgcagcaacgcgtgcggctattagtttatccagctcagggttactgaccgccagattgctcccgccagaagcctgtggattatagggcatttctgccgttgcgctcgggcgaccatgaaaatagccgttgccggtaaaattctgcccgattaatgcgctaccgcgcaccgtatcaccttcacgaatcaagctaccattggcctgccagggaaaccaccattgccccagtacggtggtcagcagcgggtaaacgccgccagtaatcaataacagaaagataaatgtacttaatgccggacgtaatccactcatggtaaacctcacaccagaccgcaaacggtcagcagtaaatcaatgactttgataccgataaacggcaccagcagcccacccagaccgtaaatccataagttacggcgcaacatggcagaagcggtaagcggtttataactcacgccttttaacgccaggggaatcaaaaagacgataatcaaggcgttgaaaatcaccgcactgaggattgcggagtcggggctatgcaggcacatgatgttcagcgcatttaactgcggatacgttgccgcgaatgccgccggaataatggcgaagtatttcgccacatcgttggcaatgctgaaggtggtcaggctgccacgggtcatcagcatctgtttgccaatgtgcaccacctcgatcaacttggtcgggttagagtcgagatcgaccatattgcccgcctctttcgccgcctgggtgccggagttcatcgccaccgcgacatctgcctgcgccagcgccggagcatcgttggtgccgtcgccggtcatcgctaccaaacgaccttccgcctgatactgacggatcaatgccagcttggcctccggtgtcgcttcggcgagaaaatcatcgacacccgcttccgcagcaatcgcggcggcagtcagacggttatcgccggtaatcatcaccgttttaatgcccattttgcgcagctgggcgaagcgctctttaataccgcctttgacgatatctttcagcgcaataacgcccagcacacgagaaccttccaccaccaccagcggcgtggctccctgacgcgcaacctgatcgactttttgatcaacatcggtagggaagtgaccaccgttagcctcaacatggcgacgaatggcatcgacagaacctttacggatcatgcggttgtcgatgttgatcccgctcatccggctttgcgcagtaaacggtacaaaggtggcatggaggctctgcacatcgcgctcgcgcaggttaaaacgctgcttggcgaggatcacaatactgcggccttccggcgtttcatcagccaggctagccagttgtgcggcgtcagccagcgttttttcatccacgccctgcgcggggataaactcgctcgcctgacggttaccgagtgtgatggtgccggttttatccagtagcagaacgtcaacgtcacctgccgcttcaactgcacgtccgctggtggcaatcacattcgcgcctagcatccggctcatcccggcgacgccgatcgcactcaacaggccgccaatagtggttgggatcagacagaccagcagcgccaccagtaccgttacgctgactgcattaccgccccacgcggaaaacggccacagcgtggcggttgccagtaaaaagacgatagtcagggcaatcagcagaatggtcagggcaatttcgttcggcgttttgcgtcgctgtgcgccttccaccatcgcgaacatccgatccagaaatgtctcgccggggttaacgctacactcaatcaccagccagtcagaaagaatacgcgtgccgccggtgacggaggcaaaatcgccgccggattcacggatcaccggtgcgctttccccggtgatggcgctttcatcgacgcttgcacccccttcaataacttcaccatcgcaggggataatatcgccagcttctaccagtacgatatcgcctttacgaagttggtcggcaggaactttgtccgccgcagcgccatatttcggctcacgcagcttgcgggcaaaggcagtttttttcacccctttcagactgttggcctgcgctttactgcggccttctgccagcgcctcggcgaaattagcgaacagtacggtgatccacagccaaccgctaatggccgcgctaaacagcgcattgccgggcatcgcaccgcttgccatcgcgatgctaatacaggtggtcagcagactgccgatccagacgataaacatcaccggattgcgccattgcgcctgcgggtttaattttttcaccgcttctttcagcgcctgaacgacaagtgttggttcgaatagcgccagttgtttacgactcatattcagtgctcactcaatatcatcaggagagatattccgccaccggaccaagcgccagggcagggataaaggtcagtgcgccaaccagcaacacggtgccgattaacaggccaacaaacagcgggccgtgcgttggcagcgtgccggagctggcggcttggctctttttactcaccaggctaccggcaattgccatcaccgggataatcaccccgaagcgaccgacaaacatgcagaacgccagtaaacagttccagaacggagagttggcgcttaatccggcaaaggcgctgccgttgttgttagcggcggaactcacggcgtacagcacttcgctaaaaccatgcgggccagggttgagcatggcgctacgtccggcgtcggtcatcatcgccaacgccgcgcccatcagcaccagcgtcggggtaaccagaattgccagtgcagtcagtttcatctcgcgtacgtcgatttttttacccagatattccggtgtacgaccaatcatcagcccggcaataaacaccgccagcaggacaaacagcatcatgccgtaaagaccagaaccgacaccgccgaacaccacttcaccaatttgcatcagccacatcggcaccatgccaccgagagcggtaaagctatcatgcatcgcaatcaccgcgccacaggaagccgccgtcgtcacgaccgcaaacaggctactgaccagcacgccgaaacggctctctttaccttccatattgatgctgctgtccgtgcccagtgccagcagatgaggattaccctgaacttctgcccacatcaccacgcctacgcagatgacaaaaatcacactcatcgcccacagcaacatgcgcccctggcggcgatcgcccatcacttcaccaaaggcaaagcacagcgccgttgggatcaagaagatcgccagcatctgcacgaagttggtcagtgcggttgggttttcaaacggatggctgctgttggcattaaagaagccaccgccgttagtaccgagcatcttgatcgcttcctgagaagctacaggccccatgggtaacagctgttgcgctccttcaacggtattcacagcctgataaggcagaaagttttgcagcgcaccttgttgaataaaaaacagtgcaatcaacaacgccacagggactagcacccataacgtgatgcgtagcagatcgacccaggcattcccgagcgtgctcatgctctggcgggtaaacgcacggatgagggcaaaaatcaccgcaatcccgctggcggcagaaagaaagttttgcaccgttaagcccgccatctggctgaaatagctcaacgtggtttcaccgctataagattgccagttggtattggtgacaaagctgacggcggtattcagcgccagatcccagctcagccctggcaactgctgtggattaagcggcagatagtgctgaccgagcaacataaaaaacagcaccgccagccccagcatgttcaggccgagaatggcacaaagatattgcttccagttcatctcacggtcagagacgccaagtgcgcgaaaaagtacgcgctcaacgcccgttgtaccgggaagaggaatgtcattaatcagccgcgccagcccgctgcctaaaggacgcgccagcaccattaacaccagtaaaaacgtggcgatcagtaagaacccttgcgcagccatcagaacgcctccgcattgatcagggcataaaccagataacccagtaataaaaacaccagcaatacgccggttatcacgcctgcactcacagtgcacctccagtggcctaaaagtgataccggaagggtagaattctggctgcaaagatttcgcaaaaatctgcgggcggggtgtaaaaaaagtataaaaatggcaaaagccatgatttaactaatgtttagtattaatttaacttttgtgtaacttaattacaggatgaatgtaaataaaccatcaataagcaaaaataagtggtcggatgagtagtaaaattacacaaaaggcggtactattttcatcagataaacaaattcatttttccggtgccattcaccgggtagatacaaaagggggagaaaagtatggaactctacagagaatatcctgcatggcttatctttttacgccgtacttatgcggttgcagcgggcgttctggcgctgcctttcatgcttttctggaaagaccgcgcccgcttttacagctacctgcatcgcgtctggagcaaaaccagcgataaaccggtgtggatggatcaggccgaaaaggcaactggtgatttttattgattgctgagttttgaatacattgaacgtctacacttactcctgtaaaccgctcaggagcagtaatgaatctacaacgatttgatgacagcaccctaatccgtatctttgcccttcatgagttacatcgactgaaagaacatggcttaacgcgcggggcgcttctcgattatcacagccgctataaactcgtctttctggcgcattctcagccggagtaccgcaaacttggcccgttcgtggctgatattcaccagtggcaaaatctggatgactattacaaccagtaccgccaacgcgtagttgttttgctttctcaccccgccaacccgcgcgatcacaccaatgttttgatgcacgttcagggttattttcgcccgcatattgattccacagaacgccagcagctggctgcgcttatcgacagttatcgccgtggcgagcaaccacttcttgcgccgctgatgcgtatcaaacactatatggcgctttatcctgacgcctggcttagtgggcagcgttatttcgaactttggccgcgtgtgattaacttgcgccatagtggagttttatgactacccatctggtctggtttcgccaggatttacgtctgcacgataatctcgcactggctgccgcctgccgcaatagctctgcacgcgtgctggcgttgtatatcgctacaccacgccagtgggcgacgcataacatgagcccgcgtcaggctgaacttatcaatgctcaactgaatgggctacaaatagcgcttgcggaaaaaggtattcctttattgttccgtgaagtggatgactttgtcgccagtgtcgaaatagttaaacaggtgtgcgcggaaaacagcgttacccacctgttttataactatcagtatgaagtgaatgagcgggcgcgggatgtggaagttgaaagagcgctgcgtaacgtggtgtgtgaaggatttgatgacagcgtgatcctgccgcctggcgcggtgatgaccggtaatcacgagatgtacaaagtctttacgccttttaagaatgcctggctgaaacggctgcgggaagggatgccggagtgcgtcgctgcgccaaaagttcgtagtagcggaagcatagagcccagcccatccattacgctgaattatcctcgtcagtctttcgatactgcgcattttccggtggaagaaaaagcggcgattgcgcaattacgccagttttgccagaacggtgccggagaatatgagcaacaacgagattttccggcagtggaaggcaccagccgtttgagcgccagcctggcaacgggcgggttaagccctcgccagtgcttgcatcgcttgttggctgaacagccgcaggcgctggacggtggggccggtagtgtctggcttaatgagctgatctggcgcgagttttaccgtcacctgataacgtatcaccccagcttgtgtaaacatcgtccatttattgcctggacggatcgtgtacagtggcagagcaatcccgcacatttacaggcctggcaggaaggcaaaacgggatacccgattgttgatgccgctatgcgtcagcttaacagcactggctggatgcataacaggctacggatgattacagccagttttctggtgaaagatttattgatcgactggcgcgaaggcgagcgatatttcatgagccagctgattgatggtgatttggcagccaataacggtggctggcagtgggccgctagtaccggaaccgatgcagcgccgtattttcgtattttcaacccgacaacccagggcgagaaatttgatcatgagggcgagtttatccgccagtggctaccggaactgcgcgatgtgccagggaaagtggtgcatgagccgtggaagtgggcgcagaaagcaggtgtgacgctggattatccgcaaccgatagtcgagcacaaagaagcgagagtacaaacgttggcagcgtatgaggcggcgcggaaggggaaataacagacgcgtcaggcaatcgagcccagatgccggatgcggcgtgaacgccttatccagcctacaaatttgtgcaaattcaataaattgcaggaaatacgtaggcctgataagacgcgtcaagcgtcgcatcaggcatcggtgctggcctattaagactccagcgccagcgcgcggtttctgaatttcagcgcctgatacagccaaatcatcagtaccagtcctacacacgccagtgcgccccaggtaatttgatcaaatacttcaatatatgcattgatggagtagttgatcgccccggaagcatcaaagctagcctggcttgtctgatcggcaatcacgcccgccagatagttcgcgatcgcgccagaaagcagcatgtagatgccggttaatacgccggtcacaccggggatttcaatgcgcgtaatttggctcatggcaaccgggtcgataaacagttccgcaaagcccatcaccgccaggcctaataccatcagtggcagagaagagtgaccatacattgcggaccagcgggcgcttaaggtcagaatgcagaatccggcgctcatcaggccaaggccaagagcaaatttcccccagatgcgcacggtacgattacccgcgacactctcttttaccacccacgccaggaacacaccgcacagcataactgcgaaggcattaatgctctggaacatcgcggtcggaacggtataaccaaacatatcgcggttaacgaagcggtcgatataaaggctaatgctgctaccgccctgttgtgcgaaggcccagaacaacatactgaagaaggtgagcgtcacaatcagccccagctccttccgctgtttctggttttctgctttgcgataaatttttgccagtacacccaggccaataatagtcgcgacaattaaggcgtatacgctccactctttccagaacagtatggtaatcagtgcaggcgttgccaccagcagaaccagcagccatccccagttcggcaggagaaagtttgtcgcacgcagtacttttttgttaacgccgcgggtatgagtgaaatgacgattgccacataagaaaatgaccagacccgcgatcatgccaaccgccgccaggccaaagcccatcgcccagctgtactcttcctgggcgtaaccacaggcgataggtgcgataatagaccccacgttacccgccgcatacatcaggctgaaaccgccatcacgacgcggatcggttggctcatacagctcgccgagcagacagcttacgttagatttaaacaggccatagccgcagacgataatcgccagggacagatagaggaaactcggatggatctcactggcacccagcaccacatgaccgatcgccatcaacaacgcccccagcatcaccgccatgcgattgccgagaactttatccgccaaaaagccaccgaggattggcgtgacatacaccaggctacagtaggcgctaaataactcgtaggcgtgagtatcgttgtattttagttgattggtgagatagagaatcagcagggcacgcatgccgtaaaagctaaaatattcccagatttgcagcgcaacgacatagtaaatagcgcgcggctgacttgcgtgtttattcataataattccacaattgacggcaacgtcacgtaatagttgcgcggcgtgcttgtgtttccttaaagttaaaactttgatacagatctgattatttatgcaatatgctgtctgattgcataaatatacattagctgaagcgtgatgatataaacaatttgcgtcttttggcgtcgggtttgtttcttaatatgtcaaaagattggctatcgacgaactggcgaggtaacgctatgttaacggtgtagctatcagaatacggaaggcgcgaagatgaaaaacaccgaactggaacaactgattaacgaaaaactgaacagcgcggcgattagtgattacgcgccgaatggtttgcaggtggaaggcaaagagacggtgcaaaaaattgttaccggtgtcaccgccagccaggctttgctcgatgaggcagtgcgtctgggcgcggatgcggtcattgtgcatcatggctacttctggaaaggagagtctccggtcattcgcggaatgaagcgtaaccgtttaaaaacgttgctggcgaatgatatcaacctgtatggctggcatttgccgcttgacgcacatcctgagctgggcaataacgcacagctggcggcgttactggggatcacggtcatgggcgaaattgagccgttggtgccgtggggcgaactgaccatgcctgtgccgggactggagctggcttcctggattgaagcgcgtctgggacgtaagccgttatggtgtggcgataccggacctgaggtggtccagcgcgtcgcctggtgcacgggcggcgggcaaagttttatcgatagcgccgcgcgttttggcgtggatgcttttattactggcgaagtttctgaacagaccattcatagtgcccgcgagcagggattgcatttttatgctgcaggtcaccatgccactgaacgtggtggtattcgcgcattgagcgagtggctgaatgaaaataccgatcttgatgtgacctttattgatattcctaatcctgcataacgaataatcagagggatcgaaagtgcaacgagcgcgttgttatctgataggtgaaacggcggtagtgctggaactggaaccgccggtgacgctggctagccagaaacggatctggcgactggcgcagcgtctggtggatatgccgaatgtggttgaagccattcccggcatgaacaatatcacggtgattttgcgtaatcctgagagcctggcgctggatgccatagagcgtttgcaacgctggtgggaggagagcgaggcgctggagccggagtctcgctttattgaaattccggtggtttacggtggtgcaggcggaccggatttggcggtggtcgcggcgcattgcgggttgagcgaaaaacaggttgttgaattgcactcctccgtggaatacgtggtctggtttttaggttttcaaccgggcttcccgtatctcgggagtttgccggaacaactacacacgccacggcgcgctgaaccgcgcttactcgttccggcaggttctgtcgggatcggcgggccgcagactggtgtttatccgctggcaacgccgggtggctggcagttgattggtcataccagtctcagcctgtttgatccggcgcgtgacgaacccatcttattacgtccgggagacagcgtgcgctttgtaccgcagaaggagggagtatgctgaagattattcgtgcgggcatgtataccactgtgcaggatggcggtcgtcacggttttcgccagagcggtatcagccactgcggcgcactggatatgcccgcgttacgcattgctaacctactggtgggtaatgacgccaatgcccccgcgctggagatcacgctcggtcagttaactgttgagttcgaaactgatgggtggtttgctctgacgggtgccggttgcgaagcgcggctggatgataatgccgtctggaccggctggcgattgccgatgaaagcaggccagcgtttaacgcttaaacgcccgcagcacgggatgcgcagttatctggcggtcgcgggtggtattgatgttccgccggtaatgggcagttgcagcaccgatctcaaagtggggattggcgggctggaaggccgtttactgaaggatggtgaccgactcccgattggcaaaagcaagcgtgattctatggaagcgcagggcgttaaacagctgctgtggggcaaccgcattcgcgccttgccggggccggaatatcatgagttcgatcgcgccagccaggatgcattctggcgtagcccctggcagcttagcagccaaagtaaccgcatgggctatcgcttacaggggcaaattttaaaacgcaccaccgatcgcgaactgttatctcacggtttgttaccgggcgtggtgcaggtgccacataacgggcagccgattgtgttgatgaacgacgcacagaccaccggtggttacccgcgtattgcctgtatcattgaggctgatatgtaccatctggcgcaaattccgctcggtcagccgattcattttgtccagtgtagtctggaagaggcactaaaagcacggcaagatcagcaacgttattttgaacaattagcgtggcggctgcacaatgaaaattgacctgaacgccgatctgggcgaaggctgcgccagcgacgcagagctattaacgctggtttcctctgccaatattgcctgtggatttcatgcaggcgatgcgcaaatcatgcaggcttgcgtgcgtgaagcaataaaaaatggtgtcgcgattggcgctcacccgagttttcccgacagggaaaattttggtcgcagcgccatgcagctgccgccagaaaccgtttacgcccagacgctgtatcaaattggcgcgctggcaacgattgcccgtgcgcaaggcggcgtaatgcgtcatgtcaaaccgcacggcatgttgtacaaccaggcggcgaaagaagcacaactggcagacgccatcgccagagcggtatacgcttgcgatccagcattgattctcgtcgggctggcgggaagcgagctgattcgtgcaggcaagcaatatggtctgacaacgcgcgaggaagtgtttgccgatcgcggttatcaggctgacggcagcctggtgccgcgaagccagagtggcgcgttgattgaaaacgaagaacaggcgctggcgcaaacgctggagatggtgcaacacggcagagtcaaaagtatcaccggcgaatgggcaacggtcgcggcgcaaacggtctgcctgcatggcgacggcgagcacgcactggcgttcgcccgccgactacgctctgcatttgccgaaaaggggattgttgtcgcagcataaccccgattaataaagaatgaaaaaaggatatcaccatgcctgaaggcccggagatccgccgtgcagcggataacctggaggcggcgatcaaaggcaaaccactaactgatgtctggtttgccttcccgcagttaaaaccttatcaaagtcaacttatcggtcaacacgttacccatgtggaaacgcgtggtaaggcgttgttaactcatttttccaacgacttaacgctctacagccataatcagctttacggcgtctggcgcgtggttgataccggcgaagagccgcagaccacgcgagtattgcgggtaaaactgcaaacggctgacaaaaccattctgctttatagcgccagcgatattgagatgttgaccccggaacaactgaccacgcatccgtttttacaacgcgttggtcccgatgtgctggatccgaatctgacgccggaggtggtgaaagaacgattattgagcccgcgctttcgtaaccgtcagtttgctggattactgctcgatcaggcgtttctggctgggcttggcaattatttgcgggtggagatcctctggcaggttgggttgactggaaatcataaagcgaaagatctcaatgcggcgcaactggatgcactcgcacacgcgttactggagattcctcgattttcctacgctacgcgggggcaggtggatgagaataagcatcatggggcgctgtttcgctttaaggtttttcatcgagatggcgaaccgtgcgaacgttgtggcagcatcattgagaaaaccacgctgagttctcgcccgttttactggtgccctggctgccagcattaagcgctccgcttcggcgcataggtactaataaaccgcgcaatggcaggccctgtcagcaaaatactgaacaggcgtagggtttgcatcgccataatgagcgccatatcggcattgctccctgcggcgatgaccgccacggtatcaagcccgccggggctggtggcgaggtaggcagtcataaaatcaatgtgcataaaccgggtcagcccccacgccatacccgcacaaatagccagcagagcaaaaatgctcagcaggatttgcggtagcgggcgtagtgcccgcagtaagatttgtttatcgaaaccaagaccaatccgccagccaattgccatatacgccatcgccagcagccattccggtagttcgatggtgatgagctgaccagactggagcactgcgcccgccagcatcgggatgagcatcgtgccggaaggaagacgcagcaggcatcccactgtaccggcaacgaccgcgagcaaaatagtaagcaggagattaatgctcactggcgggaaccagacgatatgctggttaaccgcttcagcgttatcgcccagcatcatgcgggtgaccagaacagcggcccccgcgacgaacagcactcgcagatattgcataaacgccaccaggcgaatatctgcgccgtaatcttgcgccatagcgaccattgccgccgcgccgccaggagaggagccccaggcaccggtatttccaggcaaactgctatagcgcaccaataaccaacccacaatggcgctggaaagcagcgttaccagtaaaattgcaagcacgatcggccagttgacggccagggtggtgagaatgctaccagtgaggttttgcgcaatcatgcagccaagaatggcctgggcggcgagaaaagcagagcggggaagttgcagagtaattccgcgcatactaaagatgatcccggcgatcatcggcccaagtaatagcgccgccgggagatgtaccgcgaggaaaccaatagaaaggagaagacttagcacacataacattccccactgcaaaactggcatccttcgctccctcattattttctctttggtgtatcgatacagcataaagaaagctgggccaggaaaaaataacagcaatcaaggaaaaggggaaaatcagcaattttctgaaagagatgccctttccggcggcaaagggcatcatggtaaatcagttatagttaatcttaaaaagcaccactgtatcgaaggggccagcctcgatgggggtgcctggaatggagctaagttcagccgtataggttttttcgtagaccaacatgtcactggtgaaatcggcgtattcagcatatttattgaaggtataagggctggcgttttcatccagtaaacgtagcttcagaccattaccaatcaacaatgctttatcttcttcaaccaacgtttcttcggtataaaaggaggaactgactttaaatccgtcggtgcattgatcgttttggctcttggtcgttttaatactgaacgttttgctcattgtgtggcgacgtatatccagcaaattaaatttaccaaaatcaatcacctgtgtttccggactaatggaaaaattgacgctgcaatccagcacgcgaatgttttccagaccagtaatatgatatttcaggttttgggcagtagggtcttcgttaacgctaccggcaccgtcaaattgcacgacgatatagtcgctaagcgtactttgataatcatgcggcggcatttctcgtattttgacgtataaccgcatgcgagcgagaaaggtacggctcatatgaatattagcgggatcgccgctgcaaattttgttctgccatcccatcgcgatgatctgctcaggggtataaatatcaatgttcttactgtcgatacactggttagtgtcgatgcgactttttcccagactggcatcgtaatcgacaccgttgtatgtcacgccgagttgataataacgatcctgcacccccggataggggtttacccaggcgtagacatgctcgctttcaaagttgccgttggtattgttgtcacaatagacgggaattttaatatcgtcagattcccagatcttatcaccgggtttggcattgcctggtacagcaaacggttgaatcgcttcacttttttctactgcgccaccagatgtaccaaaatagcagttcagcgccattgcagacttcaacggcagaaataacaggcagatgacgagcaacaatcccttgccagcactcatttcgcctccactgcttgtaaacggcattgtccgctgcagttgagcgtcgtcatgcgtaatgcgccgtaatcatccatgtaaccgagataaaactggctgccgctataacttccggtgtttgtgttgaccgtactaaaaggtgcaaccatcacggttttgaagcctgggagaacgcctttttcatttctccccagataggcaatggtcagataatacgcggtaggatttttcagtgtcagttggttgccctgctggctgacctgtaactgcagttcgaccttttctcctgctttcttgcgtaatgcagccggtcgccagaacaatttaatacgactttgaatagcgacctgaagtatcgcatggtcgctgcttttatccggagcgggaggaatttcgcgcatattgtagaaaaatagcgtttcgcgatcgccaggtaattgtgtggtactggcttgtttcacaacccgcacctggcttgtcgctttcggttccagacgttgaatagggggcaaagcgaccagaagagcatcgcttttctcccctttttcattttctatccaggaataagcaagataaggcagtttgtcactttggttttcgatacgcaggctggtggctttgtcattggcgttaaacacaatgcgtgtgcgatcgggttgcaccgcagcattgcaacccaagctgatggttaacaacattaagggtaatcctttaataaatgtcattctcttttccttaattaatgacaaggtaaaatcaggcgtttggtcgtgtcttccagacgttctggcagatgaataatgcagctttgctcaccccagaccacggtaaacagttgattttcagcgacaccgcttaaccaggcatgtccttcctcgccaaccatacccacgctaatgccgctgtcatcctggcggatatccgcaccgaggggagggaactgaccgctggcgttgcgtatgatgacgttaacgtctttaccggaacgggaagccagacttttgtaacctatcgcgccttcaatccatgtttccttgatgacgttttctgcaactgttacgccgtcgggtaagtcattcatgttcaccgccacggtggaaggctggtaactggaaatcaacggcaccaccgcaatgccaaaatggttggtgtagtcgagattgccctgaaccggaatatctgccacgccatcggtgctgaccatcaggcgtggttcattggtggagctgcggcgatgaaatgctgcaccatattgggttgcggtgaaagaaccgctccagctgctgctgacggaactgtaatcactggcggcataggtaccagaaatatcccactcacccgcactactcaggtgctgatagttaccgctcacctgggctccattgtccggacgatcggattgcagtccggcagacatgccccagctattacgttcatccagcgtatcgttccagctcatgcggtgtatggtgctgtggctactgttttgcatgtcatagccaacccgaccaccgttaccgaaggggaggctaatgctcagataaatctggttgtcgcgatctttatcttcgtagtgggtcgtattgaaactcgtgctaatgctgatatctctccagtcaccaatatcaacattaaaacctgctgtgatgttggcggtcgtggaggcgtctgcattccaccaggtttgatgtagcaggttggcgtaaagattgaggtttagtggggtaatcggttggcccacggataagctgatcgtctgtttttcgtcctgcgcatcgctgtcgttgtatttgtgatccagatagttggcgtagctgtgaaaatgacgatcactgaagcgataagcggcgaggctaatcgtgctgttggtggcatccacttgtttgctgtaattaaaacggtagcttaagccccgctcgtcctgctgagtatcaaaatggctactggcccaggtgacatcaaaggacagtgcgccaagccacagcatattttgcccgatacccattgcggcagaatggtagtcatcatcagaaatcagcaggccgccgtacaggctggtgttactgagcatcccccaggaaacttcattgctaaaaaaggtttcattttcagtttgatgactcatggaaggccgtggctgacccgcggccaatttatagcgaacctgtccctggcgagtcaggaagggcgtgcttgctgcgctaacctggaaattgttcacccgaccatcttcttccgtcactttgacatccagcgtgccctgaacagactgattgaggtcatcaataataaacgggcctggcgggacttttttctggtaaatgacgcggccactttgactgatcgtcaccgtggcattggtctgtgcaataccgctaatttgtggggcgtagccacgcagctcccacggtaacattcgatcgtcactcgccagtgccgcgccggtataagaaaaaccatcgaaaatattggaactgaaatcggtttcgccgagggttaacttagagcctaattgcggtaatggacgaaaaagataggtgcggcttattccgccactctggtcatggttatcttcgctatcggtcttattaagctggtaatcactgcgtaagcgccatgccccggcgttaattccggcggtaccgtaggcattcaggttagtgctgctgctgccgtcctgtgggcggtagctgctggcaaacaagttgtaatccatcaggacaccggcaacaccttctttccatgtagaggggggagcccagttttcactgtgccacgccagccaggcttgcggaatactaatattcagttgctgattggcttgatcgaaattgaagagcatttcaggtcgggaactgaaatcaatacaccgatctatctgtggcaaggactgacggacatctggttttaaaccaaatttatcgaccagactatcattgatgcatggaatggttttgtcaccctttttttgccagttaattttttgcccattactgattttgttgttattcaccgcaacgctaacaaaatattcaccgggagcaatgactcctttttcctttaataaactaatatcaatgcggtcgcgcatacttttatcgagaacattcagattgaattcgaccgccattgcgcaaggcatcgccatgaccaggcaggatacaaaagagagtcgataaatattcacggtgtccatacctgataaatattttatgaaaggcggcgatgatgccgccaaaataatacttatttataatccagcacgtaggttgcgttagcggttacttcacctgccgtgacatcgactgcattatcaatttgttccatccaggcgaaaaagttcagcgtctgttcactactgcttgcatccaggtcaagatctggcgcggcactacctaatacgatgttaccgtcatttttgtccatcagtcgtacaccgaccccagttgcttcgcctgcactggtgttgctcaacaaaggcgtagcaccagttgtcttagccgtgctatcgaaggttacgccaactttggataccggcattccgctaccgttgtcagaagcaggcagatcacagttgatcaagcgaatgtcgacggccactttattgctatgatgctcccggtttatatgggttgtcgtgacttgtccaagatctatgtttttatcaatatcttctggatgaatttcacaaggtgcttcaataacctcccccttaaagtgaatttcgccagaaccttcatcagcagcataaacaggtgcagtgaacagcagagatacggccagtgcggccaatgttttttgtcctttaaacataacagagtcctttaaggatatagaataggggtatagctacgccagaatatcgtatttgattattgctagtttttagttttgcttaaaaatattgttagttttattaaatgcaaaactaaattattggtatcatgaatttgttgtatgatgaataaaatataggggggtatagatagacgtcattttcatagggttataaatgcgactaccatgaagtttttaattgaaagtattgggttgctgataatttgagctgttctattctttttaaatatctatataggtctgttaatggattttatttttacaattttttgtgtttaggcatataaaaatcaacccgccatatgaacggcgggttaaaatatttacaacttagcaatcaaccattaacgcttgatatcgcttttaaagtcgcgtttttcatatcctgtatacagctgacgcggacgggcaatcttcataccgtcactgtgcatttcgctccagtgggcgatccagccaacggtacgtgccattgcgaaaatgacggtgaacatggaagacggaatacccatcgctttcaggatgataccagagtagaaatcgacgttcgggtacagtttcttctcgataaagtacgggtcgttcagcgcgatgttttccagctccatagccacttccagcaggtcatccttcgtgcccagctctttcagcacttcatggcaggtttcacgcattacggtggcgcgcgggtcgtaatttttgtacacgcggtgaccgaagcccatcaggcggaaagaatcatttttgtctttcgcacgacgaacaaattccggaatgtgtttaacggagctgatttcttccagcattttcagcgccgcttcgttagcaccgccgtgcgcaggtccccacagactagcaatacctgctgcgatacaggcaaacgggttcgcaccgctagagccagcggtacgcacggtggaggtagaggcgttctgttcatggtcagcgtgcaggatcagaatacggtccatagcacgttccagaatcggattaacttcatacggttcgcacggcgtggagaacatcatattcaggaagttaccggcgtaggagagatcgttgcgcgggtaaacaaatggctgaccaatggaatacttgtaacacatcgcggccatggtcggcattttgctcagcaggcggaacgcggcaatttcacggtgacgaggattgttaacatccaggctgtcgtgatagaacgccgccagcgcgccggtaataccacacatgactgccattggatggctgtcgcgacggaaagcatggaacagacgggtaatctgctcgtggatcatggtatgacgggtcaccgtagttttaaattcgtcatactgttcctgagtcggtttttcaccattcagcaggatgtaacaaacttccaggtagttagaatcggtcgccagctgatcgatcgggaaaccgcggtgcagcaaaataccttcatcaccatcaataaaagtaattttagattcgcaggatgcggtactagtgaagcctgggtcaaaggtgaacacacctttactaccgagagtacggatatcaataacatcttgacccagcgtgcctttcagcacatccagttcaacagctgtatccccgttgagggtgagttttgcttttgtatcagccatttaaggtctccttagcgccttattgcgtaagactgccggaacttaaatttgccttcgcacatcaacctggctttacccgttttttatttggctcgccgctctgtgaaagaggggaaaacctgggtacagagctctgggcgcttgcaggtaaaggatccattgatgacgaataaatggcgaatcaagtacttagcaatccgaattattaaacttgtctaccactaataactgtcccgaatgaattggtcaatacttccacactgttacataagttaatcttaggtgaaataccgacttcataacttttacgcattatatgcttttcctggtaatgtttgtaacaactttgttgaatgattgtcaaattagatgattaaaaattaaataaatgttgttatcgtgacctggatcactgttcaggataaaacccgacaaactatatgtaggttaattgtaatgattttgtgaacagcctatactgccgccaggtctccggaacaccctgcaatcccgagccacccagcgttgtaacgtgtcgttttcgcatctggaagcagtgttttgcatgacgcgcagttatagaaaggacgctgtctgacccgcaagcagaccggaggaaggaaatcccgacgtctccaggtaacagaaagttaacctctgtgcccgtagtccccagggaataataagaacagcatgtgggcgttattcatgataagaaatgtgaaaaaacaaagacctgttaatctggacctacagaccatccggttccccatcacggcgatagcgtccattctccatcgcgtttccggtgtgatcacctttgttgcagtgggcatcctgctgtggcttctgggtaccagcctctcttcccctgaaggtttcgagcaagcttccgcgattatgggcagcttcttcgtcaaatttatcatgtggggcatccttaccgctctggcgtatcacgtcgtcgtaggtattcgccacatgatgatggattttggctatctggaagaaacattcgaagcgggtaaacgctccgccaaaatctcctttgttattactgtcgtgcttagtcttctcgcaggagtcctcgtatggtaagcaacgcctccgcattaggacgcaatggcgtacatgatttcatcctcgttcgcgctaccgctatcgtcctgacgctctacatcatttatatggtcggttttttcgctaccagtggcgagctgacatatgaagtctggatcggtttcttcgcctctgcgttcaccaaagtgttcaccctgctggcgctgttttctatcttgatccatgcctggatcggcatgtggcaggtgttgaccgactacgttaaaccgctggctttgcgcctgatgctgcaactggtgattgtcgttgcactggtggtttacgtgatttatggattcgttgtggtgtggggtgtgtgatgaaattgccagtcagagaatttgatgcagttgtgattggtgccggtggcgcaggtatgcgcgcggcgctgcaaatttcccagagcggccagacctgtgcgctgctctctaaagtcttcccgacccgttcccataccgtttctgcgcaaggcggcattaccgttgcgctgggtaatacccatgaagataactgggaatggcatatgtacgacaccgtgaaagggagcgactatatcggtgaccaggacgcgattgaatatatgtgtaaaaccgggccggaagcgattctggaactcgaacacatgggcctgccgttcagccgtctcgatgatggtcgtatctatcaacgtccgtttggcggtcagagcaaaaacttcggcggcgagcaggcggcacgcactgcggcagcagctgaccgtaccggtcacgcactgttgcacacgctttatcagcagaacctgaaaaaccacaccaccattttctccgagtggtatgcgctggatctggtgaaaaaccaggatggcgcggtggtgggttgtaccgcactgtgcatcgaaaccggtgaagtggtttatttcaaagcccgcgctaccgtgctggcgactggcggagcagggcgtatttatcagtccaccaccaacgcccacattaacaccggcgacggtgtcggcatggctatccgtgccggcgtaccggtgcaggatatggaaatgtggcagttccacccgaccggcattgccggtgcgggcgtactggtcaccgaaggttgccgtggtgaaggcggttatctgctgaacaaacatggcgaacgttttatggagcgttatgcgccgaacgccaaagacctggcgggccgtgacgtggttgcgcgttccatcatgatcgaaatccgtgaaggtcgcggctgtgatggtccgtgggggccacacgcgaaactgaaactcgatcacctgggtaaagaagttctcgaatcccgtctgccgggtatcctggagctttcccgtaccttcgctcacgtcgatccggtgaaagagccgattccggttatcccaacctgtcactacatgatgggcggtattccgaccaaagttaccggtcaggcactgactgtgaatgagaaaggcgaagatgtggttgttccgggactgtttgccgttggtgaaatcgcttgtgtaagcgtacacggcgctaaccgtctgggcggcaacagcctgctggacctggtggtctttggtcgcgcggcaggtctgcatctgcaagagtctatcgccgagcagggcgcactgcgcgatgccagcgagtctgatgttgaagcgtctctggatcgcctgaaccgctggaacaataatcgtaacggtgaagatccggtggcgatccgtaaagcgctgcaagaatgtatgcagcataacttcagcgtcttccgtgaaggtgatgcgatggcgaaagggcttgagcagttgaaagtgatccgcgagcgtctgaaaaatgcccgtctggatgacacttccagcgagttcaacacccagcgcgttgagtgcctggaactggataacctgatggaaacggcgtatgcaacggctgtttctgccaacttccgtaccgaaagccgtggcgcgcatagccgcttcgacttcccggatcgtgatgatgaaaactggctgtgccactccctgtatctgccagagagcgaatccatgacgcgccgaagcgtcaacatggaaccgaaactgcgcccggcattcccgccgaagattcgtacttactaatgcggagacaggaaaatgagactcgagtttagtatttatcgctataacccggatgttgatgatgctccgcgtatgcaggattacaccctggaagcggatgaaggtcgcgacatgatgctgctggatgcgcttatccagctaaaagagaaagatcccagcctgagcttccgccgctcctgccgtgaaggtgtgtgcggttccgacggtctgaacatgaacggcaagaatggtctggcctgtattaccccgattagcgcactcaaccagccgggcaagaagattgtgattcgcccgctgccaggtttaccggtgatccgcgatttggtggtagacatgggacaattctatgcgcaatatgagaaaattaagccttacctgttgaataatggacaaaatccgccagctcgcgagcatttacagatgccagagcagcgcgaaaaactcgacgggctgtatgaatgtattctctgcgcatgttgtagtacctcttgtccgtctttctggtggaatcccgataagtttatcggcccggcaggcttgttagcggcatatcgtttcctgattgatagccgtgataccgagactgacagccgcctcgacggtttgagtgatgcattcagcgtattccgctgtcacagcatcatgaactgcgtcagtgtatgtccgaaggggctgaacccgacgcgcgccatcggccatatcaagagcatgttgttgcaacgtaatgcgtaaaccgtaggcctgataagacgcgcaagcgtcgcatcaggcaaccagtgccggatgcggcgtgaacgccttatccggcctacaagtcattacccgtaggcctgataagcgcagcgcatcaggcgtaacaaagaaatgcaggaaatctttaaaaactgcccctgacactaagacagtttttaaaggttccttcgcgagccactacgtagacaagagctcgcaagtgaaccccggcacgcacatcactgtgcgtggtagtatccacggcgaagtaagcataaaaaagatgcttaagggatcacgatgcagaacagcgctttgaaagcctggttggactcttcttacctctctggcgcaaaccagagctggatagaacagctctatgaagacttcttaaccgatcctgacagcgttgacgctaactggcgtaacacgttccagcagttacctggtacgggagtcaaaccggatcaattccactctcaaacgcgtgaatatttccgccgcctggcgaaagacgctagtcgttactctagtacgatctccgaccctgacaccaatgtgaagcaggttaaagtcctgcagctcattaacgcataccgcttccgtggtcaccagcatgcgaatctcgatccgctgggactgtggcagcaagataaagtggccgatctggatccgtctttccacgatctgaccgaagcagacttccaggagaccttcaacgtcggtagttttgccagcggcaaagaaaccatgaaactcggcgagctgctggaagccctcaagcaaacctactgcggcccgattggtgccgagtatatgcacattaccagcaccgaagaaaaacgctggatccaacagcgtatcgagtctggtcgcgcgactttcaatagcgaagagaaaaaacgcttcttaagcgaactgaccgccgctgaaggtcttgaacgttacctcggcgcaaaattccctggcgcaaaacgcttcagcctggaaggcggtgacgcgttaatcccgatgcttaaagagatgatccgccacgctggcaacagcggcacccgcgaagtggttctcgggatggcgcaccgtggtcgtctgaacgtgctggtgaacgtgctgggtaaaaaaccgcaagacttgttcgacgagttcgccggtaaacataaagaacacctcggcacgggtgacgtgaaataccacatgggcttcagctctgacttccagaccgatggcggcctggtgcacctggcgctggcgtttaacccgtctcaccttgagattgtaagcccggtagttatcggttctgttcgtgcccgtctggacagacttgatgagccgagcagcaacaaagtgctgccaatcaccatccacggtgacgccgcagtgaccgggcagggcgtggttcaggaaaccctgaacatgagcaaagcgcgtggttatgaagttggcggtacggtacgtatcgttatcaacaaccaggttggtttcaccacctctaatccgctggatgcccgttctacgccgtactgtactgatatcggtaagatggttcaggccccgatttttcacgttaacgcggacgatccggaagccgttgcctttgtgacccgtctggcgctcgatttccgtaacacctttaaacgtgatgtcttcatcgacctggtgtgctaccgccgtcacggccacaacgaagccgacgagccgagcgcaacccagccgctgatgtatcagaaaatcaaaaaacatccgacaccgcgcaaaatctacgctgacaagctggagcaggaaaaagtggcgacgctggaagatgccaccgagatggttaacctgtaccgcgatgcgctggatgctggcgattgcgtagtggcagagtggcgtccgatgaacatgcactctttcacctggagcccgtacctcaaccacgaatgggacgaagagtacccgaacaaagttgagatgaagcgcctgcaggagctggcgaaacgcatcagcacggtgccggaagcagttgaaatgcagtctcgcgttgccaagatttatggcgatcgccaggcgatggctgccggtgagaaactgttcgactggggcggtgcggaaaacctcgcttacgccacgctggttgatgaaggcattccggttcgcctgagcggtgaagactccggtcgcggtaccttcttccaccgccacgcggtgatccacaaccagtctaacggttccacttacacgccgctgcaacatatccataacgggcagggcgcgttccgtgtctgggactccgtactgtctgaagaagcagtgctggcgtttgaatatggttatgccaccgcagaaccacgcactctgaccatctgggaagcgcagttcggtgacttcgccaacggtgcgcaggtggttatcgaccagttcatctcctctggcgaacagaaatggggccggatgtgtggtctggtgatgttgctgccgcacggttacgaagggcaggggccggagcactcctccgcgcgtctggaacgttatctgcaactttgtgctgagcaaaacatgcaggtttgcgtaccgtctaccccggcacaggtttaccacatgctgcgtcgtcaggcgctgcgcgggatgcgtcgtccgctggtcgtgatgagcccgaaatccctgctgcgtcatccgctggcggtttccagcctcgaagaactggcgaacggcaccttcctgccagccatcggtgaaatcgacgagcttgatccgaagggcgtgaagcgcgtagtgatgtgttctggtaaggtttattacgacctgctggaacagcgtcgtaagaacaatcaacacgatgtcgccattgtgcgtatcgagcaactctacccgttcccgcataaagcgatgcaggaagtgttgcagcagtttgctcacgtcaaggattttgtctggtgccaggaagagccgctcaaccagggcgcatggtactgcagccagcatcatttccgtgaagtgattccgtttggggcttctctgcgttatgcaggccgcccggcctccgcctctccggcggtagggtatatgtccgttcaccagaaacagcaacaagatctggttaatgacgcgctgaacgtcgaataaataaaggatacacaatgagtagcgtagatattctggtccctgacctgcctgaatccgtagccgatgccaccgtcgcaacctggcataaaaaacccggcgacgcagtcgtacgtgatgaagtgctggtagaaatcgaaactgacaaagtggtactggaagtaccggcaagtgcagacggcattctggatgcggttctggaagatgaaggtacaacggtaacgtctcgtcagatccttggtcgcctgcgtgaaggcaacagcgccggtaaagaaaccagcgccaaatctgaagagaaagcgtccactccggcgcaacgccagcaggcgtctctggaagagcaaaacaacgatgcgttaagcccggcgatccgtcgcctgctggctgaacacaatctcgacgccagcgccattaaaggcaccggtgtgggtggtcgtctgactcgtgaagatgtggaaaaacatctggcgaaagccccggcgaaagagtctgctccggcagcggctgctccggcggcgcaaccggctctggctgcacgtagtgaaaaacgtgtcccgatgactcgcctgcgtaagcgtgtggcagagcgtctgctggaagcgaaaaactccaccgccatgctgaccacgttcaacgaagtcaacatgaagccgattatggatctgcgtaagcagtacggtgaagcgtttgaaaaacgccacggcatccgtctgggctttatgtccttctacgtgaaagcggtggttgaagccctgaaacgttacccggaagtgaacgcttctatcgacggcgatgacgtggtttaccacaactatttcgacgtcagcatggcggtttctacgccgcgcggcctggtgacgccggttctgcgtgatgtcgataccctcggcatggcagacatcgagaagaaaatcaaagagctggcagtcaaaggccgtgacggcaagctgaccgttgaagatctgaccggtggtaacttcaccatcaccaacggtggtgtgttcggttccctgatgtctacgccgatcatcaacccgccgcagagcgcaattctgggtatgcacgctatcaaagatcgtccgatggcggtgaatggtcaggttgagatcctgccgatgatgtacctggcgctgtcctacgatcaccgtctgatcgatggtcgcgaatccgtgggcttcctggtaacgatcaaagagttgctggaagatccgacgcgtctgctgctggacgtgtaatagtttaagtttcacctgcactgtagaccggataaggcattatcgccttctccggcaattgaagcctgatgcgacgctgacgcgtcttatcaggcctacgggaccaccaatgtaggtcggataaggcgcaagcgccgcatccgacaagcgatgcctgatgtgacgtttaacgtgtcttatcaggcctacgggtgaccgacaatgcccggaagcgatacgaaatattcggtctacggtttaaaagataacgattactgaaggatggacagaacacatgaacttacatgaatatcaggcaaaacaactttttgcccgctatggcttaccagcaccggtgggttatgcctgtactactccgcgcgaagcagaagaagccgctagtaaaatcggtgccggtccgtgggtagtgaaatgtcaggttcacgctggtggccgcggtaaagcgggcggtgtgaaagttgtaaacagcaaagaagacatccgtgcttttgcagaaaactggctgggcaagcgtctggtaacgtatcaaacagatgccaatggccaaccggttaaccagattctggttgaagcagcgaccgatatcgctaaagagctgtatctcggtgccgttgttgaccgtagttcccgtcgtgtggtctttatggcctccaccgaaggcggcgtggaaatcgaaaaagtggcggaagaaactccgcacctgatccataaagttgcgcttgatccgctgactggcccgatgccgtatcagggacgcgagctggcgttcaaactgggtctggaaggtaaactggttcagcagttcaccaaaatcttcatgggcctggcgaccattttcctggagcgcgacctggcgttgatcgaaatcaacccgctggtcatcaccaaacagggcgatctgatttgcctcgacggcaaactgggcgctgacggcaacgcactgttccgccagcctgatctgcgcgaaatgcgtgaccagagccaggaagatccgcgtgaagcacaggctgcacagtgggaactgaactacgttgcgctggacggtaacatcggttgtatggttaacggcgcaggtctggcgatgggtacgatggacatcgttaaactgcacggcggcgaaccggctaacttccttgacgttggcggcggcgcaaccaaagaacgtgtaaccgaagcgttcaaaatcatcctctctgacgacaaagtgaaagccgttctggttaacatcttcggcggtatcgttcgttgcgacctgatcgctgacggtatcatcggcgcggtagcagaagtgggtgttaacgtaccggtcgtggtacgtctggaaggtaacaacgccgaactcggcgcgaagaaactggctgacagcggcctgaatattattgcagcaaaaggtctgacggatgcagctcagcaggttgttgccgcagtggaggggaaataatgtccattttaatcgataaaaacaccaaggttatctgccagggctttaccggtagccaggggactttccacagtgaacaggccattgcatacggcactaaaatggttggcggcgtaaccccaggtaaaggcggcaccacccacctcggcctgccggtgttcaacaccgtgcgtgaagccgttgctgccactggcgctaccgcttctgttatctacgtaccagcaccgttctgcaaagactccattctggaagccatcgacgcaggcatcaaactgattatcaccatcactgaaggcatcccgacgctggatatgctgaccgtgaaagtgaagctggatgaagcaggcgttcgtatgatcggcccgaactgcccaggcgttatcactccgggtgaatgcaaaatcggtatccagcctggtcacattcacaaaccgggtaaagtgggtatcgtttcccgttccggtacactgacctatgaagcggttaaacagaccacggattacggtttcggtcagagcacctgtgtcggtatcggcggtgacccgatcccgggctctaactttatcgacattctcgaaatgttcgaaaaagatccgcagaccgaagcgatcgtgatgatcggtgagatcggcggtagcgctgaagaagaagcagctgcgtacatcaaagagcacgttaccaagccagttgtgggttacatcgctggtgtgactgcgccgaaaggcaaacgtatgggccacgcgggtgccatcattgccggtgggaaagggactgcggatgagaaattcgctgctctggaagccgcaggcgtgaaaaccgttcgcagcctggcggatatcggtgaagcactgaaaactgttctgaaataaatatctgtaataagaaatagccctcgccgcttccctctacaggaatggcgaagggctgtcggtttcgacatggttggccatcgtatgatggccttttttgtgcttatcggctactttttcgctgcgctatcagggtaaatttatagtcatcggtattaaaagcgttgcggctatattcaaacacccgaccatcaactaaatatccacggcttactttttcaagaatcggctttgtctggctgatattaagcagacggctcatctcttcggttggcatcagaggaatgatttcctgttcgctacgatcgataaccattttcttcacttcttcgataaagtgatatttgctattttccatgacctgccaggtgagatccgggaacaacgcaagcggcatccaggtttcttccagcgccattggcttttgcttgcgatagcgcacgcgcttcacatgccacacacgatcctgcggggtgatttgtagctgttgctgaagaaaatcgtcagccggaatcacttcgaatatcagaacttcactgtgtgtatcgacgtgacggtcgctcagtttttcatcaaaactggttaactgaaaaatatcgtaattgacccgctcttctttgacgtaagtcccgctgccctgaatgctttcgaggatctgctgctcgactagctggcgcaaagcctgacgcaccgtaacccggctgacgccaaactctgtttgtagcgcactttcagtgggtaacgcatcgccaggtttaagctcgccacgcgcaatttgttcacgaatgcgatcggcaatctgccggtataagggcttgtgtcccatttttagtatctcattaatacgaatttaaccattatgcccgataaattcatcctgtaaataatacaaatacaatacaaataatttcaatcaagtgaaattgatcacataatggtattgttttatcgggcacactggcgcgactataaaaacgatcaagtgaggatcatgatgaatctgacgactctgacccaccgcgatgcgttgtgtctgaatgcgcgctttaccagccgtgaagaggccatccacgcgttgactcaacgtcttgctgctctggggaaaatttccagtactgagcaatttctggaagaagtgtatcgccgtgaaagccttggcccgaccgccttaggtgaagggttggctgtgccgcatggcaaaactgctgcggtaaaagaagcggcgtttgcggtcgccacactcagcgagccgcttcagtgggaaggcgttgatggcccggaagcagttgatttagtggtgctgctggcgattccccccaatgaagcgggtactacgcatatgcaactgctgacagcgctgaccacgcgccttgcggatgatgagattcgggcgcgtatacagagcgcgacgacgcctgatgagttgctcagcgcgctggatgacaagggaggcacgcaaccttctgcctctttttccaacgcgccaactatcgtctgcgtaacggcctgtccggcgggtattgctcacacctatatggctgcggaatatctggaaaaagccggacgcaaactcggcgtaaatgtttacgttgaaaaacaaggcgctaacggcattgaagggcgtttaacggcggatcaactcaatagtgcaaccgcctgtatttttgcggctgaagtcgccatcaaggagagtgagcgttttaatggcattcccgcgcttagtgtgcctgttgccgagccgattcgccatgcagaagcgttgatccaacaagcgcttaccctcaagcgtagcgatgagacgcgtaccgtacagcaagatacgcaaccggtgaaaagtgtcaaaacggagctgaaacaggcactgttgagcggaatctcttttgccgtaccgttgattgtcgcggggggcacggtgctggcggtcgcggtattactgagccaaatcttcgggctacaagatctgtttaatgaagaaaactcctggctgtggatgtaccgcaagctgggcggcgggctgctcggaattttgatggtaccggtgctcgcggcctataccgcctattctctggcagataaaccggcgttagcgccaggctttgcggctggacttgccgccaacatgatcggctccgggtttctcggcgcggtcgttggcggattgatagccggttacttgatgcgctgggtgaaaaatcacttgcgtcttagcagtaaattcaatggattcctgactttttatctctacccggtgctcggtacgttgggagcgggcagtctgatgctgtttgtggtgggggaacctgtcgcctggatcaataacagccttaccgcctggctgaacggtctgagtggaagtaacgcgctgttgctgggtgccattctcggttttatgtgttcctttgaccttggagggccagtgaataaagccgcttatgcattctgcctgggcgcaatggcgaacggcgtttacggcccgtatgccattttcgcctccgtcaaaatggttagcgcatttaccgtaaccgcttccacgatgctcgcaccgcgcctgtttaaagagtttgaaattgagaccgggaaatccacctggctgttagggctggcaggtattaccgaaggggcgatcccgatggcgattgaagatccgctgcgggttattggtagctttgtgctgggctctatggtaacgggcgctattgtcggtgcgatgaatatcggccttagcacacccggtgccggcattttcagcctctttttacttcatgataatggcgcgggcggtgttatggcggcaattggctggtttggcgcggcattggtgggggctgcaatcagcactgcaattctcctgatgtggcggcgtcacgcggttaagcatggcaactatctgactgatggcgtaatgccataaacaaaaaggaaacgacgatgaaagcagtatctcgcgttcacatcaccccgcatatgcactgggatcgagagtggtatttcaccaccgaagagagtcgtattctgctggtcaataatatggaagagatcctgtgccgactggaacaggacaacgaatacaaatattacgtactcgacgggcaaacggcgatcctcgaagattatttcgcggtgaaaccggaaaacaaagaccgtgtgaagaaacaggtagaagccggcaagttgattatcggcccctggtatacccagaccgataccacgattgtttctgcggaatccatcgtccgtaatctgatgtacggaatgcgtgactgcctcgcgtttggcgagccgatgaaaataggttatttaccagattcctttggcatgtccgggcaactgccgcatatctacaatggatttggcattacccgcaccatgttctggcgcggatgtagcgagcgccacggtactgataaaaccgagtttttgtggcaaagcagtgacggtagcgaagtgacggcgcaggtgctgccgctgggctacgccatcggtaagtacttacctgccgacgaaaacggattacgtaaacgcctcgacagttattttgacgtgctggaaaaagcgtctgtaaccaaagagattttgctgccgaatgggcatgaccagatgccattgcagcaaaatatcttcgaagtgatggataagctacgtgagatctaccctcaacgtaagtttgtgatgagccgctttgaagaggtatttgagaagatcgaagcgcagcgagataatctggcaaccctgaaaggggaatttattgatggcaaatatatgcgcgtgcatcgcaccatcggttctacgcgtatggatatcaaaattgcccacgcgcgtattgaaaataagattgttaatctgctggaaccgctggcaacactggcctggacgttgggttttgaataccaccacggcttgctggagaaaatgtggaaagagatcttaaaaaatcatgcccacgacagtatcggctgctgctgtagtgacaaagttcatcgcgaaatcgtcgcccgcttcgaactggctgaagacatggcggataatctgattcgtttctacatgcgcaaaattgccgacaacatgccgcagagcgacgccgacaaactcgtcctgtttaacctgatgccctggccgcgtgaagaagttatcaacaccactgtgcggctgcgcgccagccagtttaatttgcgggacgatcgcggtcagcctgtaccgtattttattcgccatgcccgtgagatcgatccaggcctaatcgatcggcaaatagttcattacggtaattacgatccctttatggagtttgatatacagatcaaccagattgtcccttctatgggctatcgcacgctttatatcgaagcgaatcagcctggcaacgtaattgcggcaaaaagtgacgctgaagggatactggaaaatgctttctggcaaattgcgctcaatgaggatggttctctgcaactggtagataaagacagcggtgtgcgctatgaccgggtattgcaaattgaagaaagctctgatgatggtgatgaatatgactatagtcccgcaaaagaagagtgggtaattaccgcagcgaacgcgaaaccgcaatgcgatattattcatgaagcctggcagagcagggctgttatccgctatgacatggcagtgccgctcaatttgagtgaacgcagcgcccggcaatccactggcagagtaggggtggtgttggttgtcactcttagtcataacagcaggcgtattgatgtggatatcaatcttgataaccaggctgacgatcatcgccttcgtgtcctggtccctacaccttttaacaccgacagtgttctggcagatacgcagtttggtagcctaacgcgccccgtgaacgacagtgcaatgaacaactggcagcaagaaggctggaaagaagcgccggttccggtatggaatatgctcaactatgttgccttacaggaagggcgtaacggcatggctgtctttagcgaagggttacgtgaatttgaagtcatcggtgaagagaagaaaacctttgccattacgttgctgcgtggcgtgggcttactgggcaaagaagatctgcttttaaggcctgggcggcctagcggaattaaaatgccagtcccggacagtcaactacgtggtctgctttcttgtcgcctaagtttattgagttataccggtacgccaaccgccgctggtgtagctcagcaggcgcgagcatggctgactccagtacagtgttacaacaaaatcccatgggatgtgatgaagctcaacaaagccggattcaacgtgccggaaagttatagtttgttgaaaatgcccccagtgggatgcctgataagcgcacttaagaaagctgaagaccgacaagaagtgattttacggctgtttaatccggctgaaagtgcaacctgtgatgcgactgttgctttcagtcgcgaggtgatttcttgcagtgaaacgatgatggatgaacacattaccaccgaggaaaatcaaggtagtaatctaagcgggccttttttacccggccagagtcggacgttcagttaccggcttgcctgaatagcaatcaaaccgaagccacatatgcgcggccagattgttgacaaagggcgctttgttcatgccggatacggcatgaacgctttattcggtctacaaaagcaggcaaattcaatatattgcagagatgatgtagacactggcaagcgtagcgcatcaggtaattttgcgtttatcttcactctcaagccacgtatatgtggctttatttttaacaaaataataaccctgggtgagttaattataatataattataagttaactaaatgttaatattggcggggtggatttatgcctttattagtaatcctgaaactctgcgtcgtattagccagtgaccaaaaaaagaattaaggtcaaccgtgctgtttttgcttcgtctctttttatctttaattgccaaccgaaactaatttcagccttataactcacacattttaaacataaatgtcactaaagttaccttattgaaacatgattaacataatttgtaggaattgatatttatcaatgtataagtcttggaaatgggcatcaaaaagagataaattgttctcgatcaaattggctgaaaggcggtaatttagctataaattgatcaccgtcgaaaaatgcaaatttgcttcaacaaaaacctgtttattgtaaggattttgcggcgtaatatatacgtgggatcaatttgagtttttattaacatgtttgcaacctttctttacgccgtttttgtgtgcattcacatggtatgatgaaagtgttcaaacaaatttctattggggcatgcgtgtgaccctttctaacggggttcactctcggagtcttcatgcgatgagcaaggagtcatgatgttagatatagtcgaactgagccgcttacagtttgccttgaccgcgatgtaccacttcctttttgtgccactgacgctcggtatggcgttcctgctggccattatggaaacggtctacgtcctctccggcaaacagatttataaagatatgaccaagttctggggcaagttgtttggtatcaacttcgctctgggtgtggctaccggtctgaccatggagttccagttcgggactaactggtcttactattcccactatgtaggggatatcttcggtgcgccgctggcaatcgaaggtctgatggccttcttcctcgaatccacctttgtaggtctgttcttcttcggttgggatcgtctgggtaaagttcagcatatgtgtgtcacctggctggtggcgctcggtagtaacctgtccgcactgtggattctggttgcgaacggctggatgcaaaacccaatcgcgtccgatttcaactttgaaactatgcgtatggagatggtgagcttctccgagctggtgcttaacccggttgctcaggtgaaattcgttcacactgtagcgtctggttatgtgactggcgcgatgttcatcctcggtatcagcgcatggtatatgctgaaaggtcgtgacttcgccttcgctaaacgctcctttgctatcgctgccagcttcggtatggctgctgttctgtctgttattgttctgggtgatgaatccggctacgaaatgggcgacgtgcagaaaaccaaactggctgctattgaagccgagtgggaaacgcaacctgcgcctgctgcctttactctgttcggcattcctgatcaggaagaggagacgaacaaatttgcgattcagatcccttacgcactgggcatcattgcaacgcgttccgtggataccccggttatcggcctgaaagagctgatggtgcagcatgaagaacgcattcgtaacgggatgaaggcgtactctctgctcgaacaactgcgttctggttctaccgaccaggcggttcgtgaccagttcaatagcatgaagaaagacctcggttacggtctgctgctgaaacgctatacgccaaacgtggctgatgcgactgaagcgcagattcaacaggcaaccaaagactccatcccgcgtgtagcgccgctgtactttgcgttccgtatcatggtggcgtgtggcttcctgcttctggcaatcatcgcgctctctttctggagtgtcatccgcaaccgcattggcgagaaaaaatggcttctgcgcgccgcgctgtacggtattccgctgccgtggattgctgtagaagcgggctggttcgtggctgaatatggccgccaaccgtgggctatcggtgaagtgctgccgacagctgtggcgaacagcagtctgaccgcaggcgatctcatcttcagtatggtgctgatttgcggcctgtataccctgttcctggtggcagaattgttcttaatgttcaagtttgcacgcctcggcccaagcagcctgaaaaccggtcgctatcactttgagcagtcttccacgactactcagccggcacgctaagacaggagtcgtcaaatgatcgattatgaagtattgcgttttatctggtggctgctggttggcgttctgctgattggttttgcagtcactgacggtttcgacatgggggtgggcatgctcacccgtttcctcggtcgtaacgacaccgagcgtcgaattatgattaactccattgcaccacactgggacggtaaccaggtttggctgatcaccgcgggcggcgcactctttgctgcctggccgatggtctatgccgctgcgttctccggcttctatgtggcgatgatcctcgtgctggcgtctttgttcttccgtccggtcggttttgactaccgctccaagattgaagaaacccgctggcgtaacatgtgggactggggcatcttcattggtagcttcgttccgccgctggtaattggtgtagcgttcggtaacctgttgcagggcgtaccgttcaacgttgatgaatatctgcgtctgtactacaccggtaacttcttccagttgcttaacccgttcggcctgctggcaggcgtggtgagcgtagggatgatcattactcagggcgcaacctatctgcaaatgcgtaccgtgggcgaactgcacctgcgtacccgtgcaacggctcaggtggctgcgctggtgacactggtctgtttcgcactggctggcgtatgggtgatgtacggtatcgatggttatgtcgtgaaaagcacaatggaccattacgcagcctctaacccactgaataaagaagtggttcgtgaagctggcgcatggctggttaacttcaacaacacgccaattctgtgggctattccggcactgggtgtggttctgccgctgctgaccatcctgactgcacgtatggataaagccgcgtgggcgtttgtgttctcctccctgacgctggcctgcatcatcctgacagccggtatcgcaatgttcccgtttgtgatgccgtccagcaccatgatgaacgcaagtctgacaatgtgggatgcaacttccagccagctgacgcttaacgtcatgacctgggttgcggtggttctggtaccgatcattctgctctacaccgcctggtgttactggaaaatgttcggtcgtatcaccaaagaagatattgaacgtaacacccactctctgtactaagtaaggagctaaaaatgtggtatttcgcatggattctgggaacgcttcttgcctgtagctttggggtaatcaccgcgctggcgcttgaacacgtcgaaagtggcaaagccggtcaagaagacatctgatgagtaagattatcgcgactttgtatgcggtaatggacaagcgccccctgcgggcgctttccttcgtgatggcgcttctgttagcaggatgtatgttttgggacccatctcgttttgccgcgaagaccagtgaactggaaatctggcatggtttattgctgatgtgggccgtctgtgctggtgtgattcacggcgtgggctttcgtccgcagaaggttctttggcaagggattttttgcccattgcttgccgatattgttctcattgtcgggctgattttcttcttcttttaaatcagaattctctttaaaaaattatgggccgctccaggcccataaatttttacgctcccttaacttgccctcattcccaaacctcaatcgcgcgcgtatagtagcagcgtttaaaagctctaacttttgttgcattaccgggatgtaaagtgaatacaacgctgtttcgatggccggttcgcgtctactatgaagataccgatgccggtggtgtggtgtaccacgccagttacgtcgctttttatgaaagagcacgcacagagatgctgcgtcatcatcacttcagtcagcaggcgctgatggctgaacgcgttgcctttgtggtacgtaaaatgacggtggaatattacgcacctgcgcggctcgacgatatgctcgaaatacagactgaaataacaagtatgcgtggcacctctttggttttcacgcaacgtattgtcaacgccgagaatactttgctgaatgaagcagaggttctggttgtttgcgttgacccactcaaaatgaagcctcgtgcgcttcccaagtctattgtcgcggagtttaagcagtgactgacatgaatatccttgatttgttcctgaaggctagccttctggttaaacttatcatgttgattttgattggttttagtatcgcatcttgggccattattatccagcggacccgtattcttaacgcagcggcgcgcgaagccgaagcgtttgaagataaattctggtctggaatcgaactctctcgcctctatcaagagagccaggggaaacgggataatctgactggtagcgaacaaatcttttacagcgggttcaaagagtttgtgcgcctgcatcgtgccaatagccatgcgccggaagccgtagtggaaggggcgagccgtgctatgcgtatctccatgaaccgtgaacttgaaaatctggaaacgcacattccgttcctcggtacggttggctccatcagcccgtatattggtctgtttggtacggtctgggggatcatgcacgcctttatcgccctcggggcggtaaaacaagcaacactgcaaatggttgcgcccggtatcgcagaagcgttgattgcgactgcaattggtctgtttgccgctatcccggcagttatggcctacaaccgcctcaaccagcgcgtaaacaaactggaactgaattacgacaactttatggaagagtttaccgcgattctgcaccgccaggcgtttaccgttagcgagagcaacaaggggtaagccatggccagagcgcgtggacgaggtcgtcgcgatctcaagtccgaaatcaacattgtaccgttgctggacgtactgctggtgctgttgctgatctttatggcgacagcgcccatcatcacccagagcgtggaggtcgatctgccagacgctactgaaagtcaggcggtgagcagtaacgataatccgccagtgattgttgaagtgtctggtattggtcagtacaccgtggtggttgagaaagatcgcctggagcgtttaccaccagagcaggtggtggcggaagtgtccagccgtttcaaggccaacccgaaaacggtctttctgatcggtggcgcaaaagatgtgccttacgatgaaataattaaagcactgaacttgttacatagtgcgggtgtgaaaagcgttggtttaatgacgcagcctatctaaacatctgcgtttcccttgcttgaaagagagcgggtaacaggcgaacagtttttggaaaccgagagtgagtaaggcaaccgaacaaaacgacaagctcaagcgggcgataattattagtgcagtgctgcatgtcatcttatttgcggcgctgatctggagtagcttcgatgagaatatagaagctagtgccggaggcggcggtggtagctccatcgacgctgtcttggttgatagtggtgcggtagttgagcagtacaaacgcatgcaaagccaggaaagtagcgcgaagcgttctgatgaacagcgcaagatgaaggaacagcaggctgctgaagaactgcgtgagaaacaagcggctgaacaggaacgcctgaagcaacttgagaaagagcggttagcggctcaggagcagaaaaagcaggctgaagaagccgcaaaacaggccgagttaaagcagaagcaagctgaagaggcggcagcgaaagcggcggcagatgctaaagcgaaggccgaagcagatgctaaagctgcggaagaagcagcgaagaaagcggctgcagacgcaaagaaaaaagcagaagcagaagccgccaaagccgcagccgaagcgcagaaaaaagccgaggcagccgctgcggcactgaagaagaaagcggaagcggcagaagcagctgcagctgaagcaagaaagaaagcggcaactgaagctgctgaaaaagccaaagcagaagctgagaagaaagcggctgctgaaaaggctgcagctgataagaaagcggcagcagagaaagctgcagccgacaaaaaagcagcagaaaaagcggctgctgaaaaggcagcagctgataagaaagcagcggcagaaaaagccgccgcagacaaaaaagcggcagcggcaaaagctgcagctgaaaaagccgctgcagcaaaagcggccgcagaggcagatgatattttcggtgagctaagctctggtaagaatgcaccgaaaacggggggaggggcgaaagggaacaatgctagccctgccgggagtggtaatactaaaaacaatggcgcaagtggggccgatatcaataactatgccgggcagattaaatctgctatcgaaagtaagttctatgacgcaagctcctatgcaggcaaaacctgtacgctgcgcataaaactggcacccgatggtatgttactggatatcaaacctgaaggtggcgatcccgcactttgtcaggctgcgttggcagcagctaaacttgcgaagatcccgaaaccaccaagccaggcagtatatgaagtgttcaaaaacgcgccattggacttcaaaccgtaatcgcgatgttgactgttcggacggtcaacatcaggcaccggttgccacggggttctggtagttttgtgtattttagtttgttaacattctgctaaattatcgtgggccatcggtccagataagggagatatgatgaagcaggcattacgagtagcatttggttttctcatactgtgggcaagtgttctgcatgctgaagtccgcattgtgatcgacagcggtgtagattccggtcgtcctattggtgttgttcctttccagtgggcggggcctggtgcggcacctgaagatattggcggcatcgttgctgctgacttgcgtaacagcggtaaatttaatccgttagatcgcgctcgtctgccacagcagccgggtagtgcgcaggaagtacaaccagctgcatggtccgcactgggcattgacgctgtagttgtcggtcaggtcactccgaatccggatggttcttacaatgttgcttatcaacttgttgacactggcggcgcaccgggtactgtacttgctcagaacagctacaaagtgaacaagcagtggctgcgttatgctggtcataccgccagtgatgaagtgtttgaaaaactgaccggcattaaaggtgcgttccgtactcgtattgcctacgttgttcagaccaacggcggtcagttcccgtatgaactgcgcgtatctgactatgacggttacaaccagtttgtcgttcaccgtagtccgcagccgctgatgtctccggcgtggagtccagacggttctaaactggcttatgtgaccttcgaaagcggtcgttccacgctggttattcagacgctggcaaatggcgctgtacgtcaggtggctagtttcccgcgtcacaacggtgcacctgcattcagcccagacggcagcaaactggcattcgccttgagcaaaaccggtagtctgaacctgtacgtaatggatttggcttctggtcagatccgccaggtgactgatggtcgcagtaacaataccgaaccgacctggttcccggatagccagaacctggcatttacttctgaccaggccggtcgtccgcaggtttataaagtgaatatcaacggcggtgcgccacaacgtattacctgggaaggtagccagaaccaggatgcggatgtcagcagcgacggtaaatttatggtaatggtcagctccaatggtgggcagcagcacattgccaaacaagatctggcaacgggaggcgtacaagttctgagctccacgttcctggatgaaacgccaagtctggcacctaacggcactatggtaatctacagctcttctcaggggatgggatccgtgctgaatttggtttctacagatgggcgtttcaaagcgcgtcttccggcaactgatggacaggtcaaattccctgcctggagcccgtatctgtgataataattaattgaatagtaaaggaatcattgaaatgcaactgaacaaagtgctgaaagggctgatgattgctctgcctgttatggcaattgcggcatgttcttccaacaagaacgccagcaatgacggcagcgaaggcatgctgggtgccggcactggtatggatgcgaacggcggcaacggcaacatgtcttccgaagagcaggctcgtctgcaaatgcaacagctgcagcagaacaacatcgtttacttcgatctggacaagtacgatatccgttctgacttcgctcaaatgctggatgcacatgcaaacttcctgcgtagcaacccgtcttacaaagtcaccgtagaaggtcacgcggacgaacgtggtactccggaatacaacatctccctgggtgaacgtcgtgcgaacgccgttaagatgtacctgcagggtaaaggcgtttctgcagaccagatctccatcgtttcttacggtaaagaaaaacctgcagtactgggtcatgacgaagcggcatactccaaaaaccgtcgtgcggtactggtttactaagagaattgcatgagcagtaacttcagacatcaactattgagtctgagcttactggttggtatagcggccccctgggccgcttttgctcaggcaccaatcagtagtgtcggcagtggcagcgtcgaagaccgcgtcactcaacttgagcgtatttctaatgctcacagccagcttttaacccaactccagcaacaactttctgataatcaatccgatattgattccctgcgtggtcagattcaggaaaatcagtatcaactgaatcaggtcgtggagcggcaaaagcagatcctgttgcagatcgacagcctcagcagcggtggtgcagcggcgcaaagtaccagcggcgatcaaagcggtgcggcggcaagtacgacgccgacagctgatgctggtactgcgaatgctggcgcgccggtgaaaagcggtaatgcaaacacggattacaatgcagctattgcgctggtgcaggataaatcccgccaggatgacgcaatggtggcatttcagaatttcatcaaaaattaccctgatagtacttacctgccaaacgccaattattggctgggtcagttaaactacaacaagggtaaaaaagatgatgcggcgtactattttgctagcgtagtgaaaaactatccgaagagtccaaaggctgcagatgcgatgtttaaagtcggcgtcatcatgcaggacaaaggtgacaccgcaaaagcgaaagccgtataccagcaggttatcagtaaataccctggtactgatggcgctaaacaggcacaaaaacgtctgaacgcgatgtaatgcataacacacgaccagaagtcgcattatttctggtcgtgtcgtgcgaatcataagcagttgagtgatctacatcgaaatttttgttgcgctcaagtctgaaatcagtaatatatgccgccgttgccacgggatatcaaacaaaccgaaagcaacgaaaaagtgggtcgttagctcagttggtagagcagttgacttttaatcaattggtcgcaggttcgaatcctgcacgacccaccaatcgctaaggtggaagcggtagtaaaacgtgaaggataacgttgcatgagcaacggcccgaagggcgagacgaagtcgagtcatcctgcacgacccaccactaacatagttagttgtagtatccagcgtagtatcgggtgattagctcagctgggagagcacctcccttacaaggagggggtcggcggttcgatcccgtcatcacccaccaccgggtcgttagctcagttggtagagcagttgacttttaatcaattggtcgcaggttcgaatcctgcacgacccaccagttttaacatcgaagacagatgttaagcgtgtaggataacgttgcgtcagcaacggcccgtagggcgagcgaagcgagtcatcctgcacgacccaccactaatgacggtgggttcggtggaagtagtttgtagtatccagcgcagtatcgggtgattagctcagctgggagagcacctcccttacaaggagggggtcggcggttcgatcccgtcatcacccaccactcgggtcgttagctcagttggtagagcagttgacttttaatcaattggtcgcaggttcgaatcctgcacgacccaccagttttaacatcaaactcagatgttaagcgtgaaggataacgttgcgccagcaacggcccgtagggcgagcgaagcgagtcatcctgcacgacccaccaatcttaaagattggccccgagtaaaaatctttcaggtaacacccgtatgggtcgttagctcagttggtagagcagttgacttttaatcaattggtcgcaggttcgaatcctgcacgacccaccaatttaaaggtggttactggtagagaacgtgaaggataacgttgcgttagcaacggcccgaagggcgagacgaagtcgagtcatcctgcacgacccaccatcctgaatgattaaggcagcataatcccgcaaggggtcgttagctcagttggtagagcagttgacttttaatcaattggtcgcaggttcgaatcctgcacgacccaccaatgtaaaaaagcgccctaaaggcgcttttttgctatctgcgatactcaaagattcgaacctgcagcaggtttgagttgagcgcagcgaaacaacggagccgctcgcggcgacggcccgaagggcgagcgaagcgagtcatcctgcacgacccaccaatgtaaaaaagcgccctaaaggcgcttttttgctattcaggcatcctcaatttcactttgtaaacctgatgacatcgtcagagcttactgtgcaagcaactctatgtcggtggaattaggcgtaaaatgacgcatcctgcacattaggcgtaattcgagtgacttttccccaccattcgactatcttgtttagcatataaaacaaattacaccgataacagcgaatattacgctaatgtcggttttaacgttaagcctgtaaaacgagatggtaagatgagcgtaatgtttgatccagacacggcgatttatcctttccccccgaagccgacgccgttaagcattgatgaaaaagcgtattaccgcgagaagataaaacgtctgctaaaagaacgtaatgcggtgatggttgcccactactataccgatcccgaaattcaacaactggcagaagaaaccggtggctgtatttctgattctctggaaatggcgcgcttcggtgcaaagcatcccgcttctactttgttagtcgctggggtgagatttatgggagaaaccgccaaaattctcagtccggaaaaaacaattctgatgccgacacttcaggctgaatgtagtctggatctcgactgccctgttgaagaatttaacgcattttgcgatgcccatcccgatcgtactgtcgtcgtctacgccaacacttctgctgcggtaaaagcgcgcgcagattgggtggtaactagtagcattgccgtcgaacttattgatcatcttgatagtttgggtgaaaaaatcatctgggcacccgacaaacatctggggcgttacgtgcaaaaacagacgggtggagacattctatgctggcagggtgcctgtattgtgcatgatgaatttaagactcaggcgttaacccgcttgcaagaagaatacccggatgctgccatactggtgcatccagaaagtccacaagctattgtcgatatggcggatgcggtcggttccaccagtcaactgatcgctgctgcgaaaacattgccacatcagaggcttattgtggcaaccgatcggggtattttctacaaaatgcagcaggcggtgccagataaagagttactggaagcaccaaccgcaggtgagggtgcaacctgccgcagctgcgcgcattgtccgtggatggccatgaatggccttcaggccatcgcagaggcattagaacaggaaggaagcaatcacgaggttcatgttgatgaaaggctgcgagagagggcgctggtgccgctcaatcgtatgctggattttgcggctacactacgtggataacgaataataaggcgtaacgttacgctttgggggaaagatggatttttttagtgtgcagaatatcctggtacatataccaataggggcaggcggttatgatctcagttggatcgaagcggtaggcacgatcgccgggttgctgtgtattggccttgccagtctggagaagatcagcaactacttctttggcctgatcaacgtcaccttgtttggcattattttctttcagattcagctgtatgccagcctgctattacaggtgtttttctttgccgcgaatatttacggttggtatgcgtggagccgacaaaccagtcagaacgaggcggagttgaaaattcgctggttgccattgccgaaggcactcagctggttggcggtttgcgttgttagcattggtctgatgacggtatttatcaatccggtgtttgcatttttgacccgcgtggcagtcatgatcatgcaagcattaggattacaggttgtgatgcctgaactgcaaccggacgctttcccgttctgggatagttgcatgatggtgttatctatcgtggcaatgattctgatgacgcgtaagtatgtggaaaactggctgttgtgggtgattattaacgtgattagcgtcgttatttttgcacttcagggcgtttacgccatgtctctggagtacatcatcctgacctttattgcgctcaacggcagccggatgtggatcaacagcgcacgtgaaagaggcagtcgcgcgctgtcccattaatggtgatgatgactatggccagacaccccttcattcaggtggcagtctggcccatgacaaggttgatattccatctgaatggtggcgtgctcaatctgatagtgatccatcaggtagtgttggatctgatccaacaaggcatcgtgatcgtgtggcgggatcacctgcacatgcaacgtcatcaccggcttctcgcctaccatccatacatgtacatggtgcacattgcggacttccgggatttcccggcacatacgacgcttcagttcagcgatatccaggcttaccggtgcaccttcaagtaattcattcacgctatctttcaacagtcgccacgcgctacgcagaaccagaaggctcaccagtatgctgagaatggggtcagcaggtgtccagccagtccagataataatcaacgcggcaataatagccccaacgctacccagcaggtccccgagcacatgcagtgccgctgctcgtacgttgaggtttttctcttcgctgccgtgatgaagtaaccagaaagaaagtatatttgccagcaacccagccacggcaattgccatcatcatgccgccctcgaccggacgcggcgtgcggaagcgttctatcgcctcccagacaatcaaaatggtaattaccacgagggctatggcattcacaaacgccgcgagcgtggtcagtcttagccaaccgaaagtgtggcgaatggtgggaggacgacgactaaattgcacggcgagtagggcgaaaagcagggcggcagtatcggtcaacatatgacccgcatcggccagcaatgccagagaaccagaaagaaaaccaccaacgacttctaccagcataaacccggcagtcacgccgaaagcatacaacaagcgacgagcattattatcttctggcaggtgactggacgtgtgactgtgactgtgcgccatgacgagtcatcccttaattattctcacttaactttatgacatcatactgcttttagaagtgaaaaattaaaagggagagactccgctctcccattattggctattttgcagggttactgcgtggtaccgtcggttttggtatcgacatcattattgatgccatcaccggtttgtacctttttattgatatccggacagcgaccatctttgcacatggtgttcttgtgctcttcatctttggtcattccgtcattgttcatactagaaccatcgctatgcagcattgtgccgccagaaccggtatttaccccgttattgtcgacgttatttggcgcgacattttcacgggcgtcaggggctacctggcccgcatcagctgcggcgtttgcctggccgttattagtttgcgctccgctatcggcagccagtgcggcaccgctggcaaggcttagagtggcagtcagaaataatgtggccagttttgtcattttcataggatgctcctgttatggtcgttatgtcggataacctcttccaacagtgcatttgcaggtgaatataaggcattggtttaagatttcagccaggttatgaaacgcagcagagaatcttgaaataattaacaaacaaaggagttacagttagaaattgtaggagagatctcgtttttcgcgacaatctggcgtttttcttgctaattccaggattaatccgttcatagtgtaaaaccccgtttacacattctgacggaagatatagattggaagtattgcattcactaagataagtatggcaacactggaacagacatgaattatcagaacgacgatttacgcatcaaagaaatcaaagagttacttcctcctgtcgcattgctggaaaaattccccgctactgaaaatgccgcgaatacggttgcccatgcccgaaaagcgatccataagatcctgaaaggtaatgatgatcgcctgttggttgtgattggcccatgcagtattcatgatcctgtcgcggcaaaagagtatgccactcgcttgctggcgctgcgtgaagagctgaaagatgagctggaaatcgtaatgcgcgtctattttgaaaagccgcgtaccacggtgggctggaaagggctgattaacgatccgcatatggataatggcttccagatcaacgacggtctgcgtatagcccgtaaattgctgcttgatattaacgacagcggtctgccagcggcaggtgagtttctcgatatgatcaccccacaatatctcgctgacctgatgagctggggcgcaattggcgcacgtaccaccgaaagccaggtgcaccgcgaactggcaagtgggctttcttgtccggtcggcttcaaaaatggcaccgacggtacgattaaagtggctatcgatgccattaatgccgccggtgcgccgcactgcttcctgtccgtaacgaaatgggggcatagcgcgattgtgaataccagcggtaacggcgattgccatatcattctgcgcggcggtaaagagcctaactacagcgcgaagcacgttgctgaagtgaaagaagggctgaacaaagcaggcctgccagcacaggtgatgatcgatttcagccatgctaacagctccaaacaattcaaaaagcagatggatgtttgtgctgacgtttgccagcagattgccggtggcgaaaaggccattattggcgtgatggtggaaagccatctggtggaaggcaatcagagcctcgagagcggggagccgctggcctacggtaagagcatcaccgatgcctgcatcggctgggaagataccgatgctctgttacgtcaactggcgaatgcagtaaaagcgcgtcgcgggtaaggtttaattgtcggatgcgccgtcagagtggcgtatccgatgaatcaccacaggcctgataagtcgcgcagcgtcgcatcaggcaatgtgctccattgttagcaacaaaaaagccgactcacttgcagtcggctttctcattttaaacgaatgacgtttacttcgctttaccctggtttgcaaccgccgctgctttcgctgcgatctcgtcagcattacccagataatagcgtttcagcggtttgaaattctcgtcgaactcatacaccagcggcacgccagtcgggatattaagctcaagaatctcttcttcgctcatgttatcaagatatttcaccagcgcacgtaaagagttaccgtgtgcagcgatgatcacgcgctcaccgctcttcatacgcggcagaatagtttcattccagtaagggatcacgcggtcaatggtcagcgccaggctttccgtcagcggcagttctttctcgctcagtttcgcgtaacgcggatcgtgacccggataacgctcatcatctttagtcagttccggcggagtcactgcaaaaccacgacgccactgtttcacctgctcgtcgccatacttttcagcagtttccgctttgttcagaccctgcaacgcaccgtagtgacgttcgttcagtttccaggatttctcaacgggcagccatgcctgatccagttcgtccagcacattccacagggtatggatagcgcgtttcagcacagaagtgtaagcaaagtcaaagctgtaaccttcctctttcagcagcttacctgctgcttttgcttcgcttacgcctttctcagacagatccacgtcgtaccaaccggtgaaacggttttctttgttccactgactttcgccatgacgaaccagaaccagcttagttacagccatatacttactcctcaaatcatcttttaatgataataattctcattatattgccgcgacgaagcaacagcaatgcttacgcataaccatagcgaaaatagtggcgcagtgtaaggttgttgtgaatattgagttgcaaatatgtcggtgtttgctggtgatttgaacaatatgagataaagccctcatgacgagggcgtaacattactcagcaataaactgatattccgtcaggctggaatactcttcgccaggacgcaggaagcagtccggttgcggccattcagggtggttcgggctgtccggtagaaactcgctttccagagccagcccttgccagtcggcgtaaggttcggttccccggctcggtgtgccgccgaggaagttgccggagtagaattgcagagccggagcggtggtgtagaccttcagctgcaatttttcatctgcactccagacatgcgccgccactttcttgccatcgcctttggcctgtaacaagaatgcgtgatcgtaacctttcactttgcgctgatcgtcgtcggcaagaaactcactggcgatgattttggcgctgcggaaatcaaaagacgttccggcgacagatttcaggccgtcgtgcggaatgccgccttcatcaaccggcagatattcgtccgccagaatctgcaacttgtgattgcgcacgtcagactgctcgccgtcaagattgaaatagacgtgattagtcatattcaccgggcaaggtttatcaactgtggcgcgataagtaatggagatacggttatcgtcggtcagacgatattgcaccgtcgcgccgagattacccgggaagccctgatcaccatcatcactactcagggcaaacagcacctgacgatcgttctggttcacaatctgccagcgacgtttgtcgaacccttccggcccgccgtgcagctggttaacgccctgacttgggctaagcgtcacggtttcaccgtcaaaggtataacggctattggcgatacggttggcataacgaccaatagaggcccccagaaacgcggcctgatcctgatagcattccgggctggcacagccgagcagcgcctcgcggacgctgccatcggaaagcggaatacgggcggaaagtaaagtcgcaccccagtccatcagcgtgactaccatccctgcgttgttacgcaaagttaacagtcggtacggctgaccatcgggtgccagtgcgggagtttcgttcagcactgtcctgctccttgacttggtttacaaacgtaaaaagtctctttaatacctgtttttgcttcatattgttcagcgacagcttgctgtacggcaggcaccagctcttccgggatcagcgcgacgatacagccgccaaatccgccgccggtcatgcgtacgccacctttgtcgccaatcacagctttgacgatttctaccagagtgtcaatttgcggcacggtgatttcgaaatcatcgcgcatagaggcatgagactccgccatcaactcgcccatacgtttcaggtcgccttgctccagcgcgctggcagcttcaacggtgcgggcgttttcagtcagtatatgacgcacgcgttttgccacgatcgggtccagttcatgcgcaacagcgttgaactcttcaatggtgacatcacgcagggctggctgctggaagaaacgcgcaccggtttcgcactgttcacgacgggtgttgtattcgctgccaaccagggtacgtttgaagttactgttgatgatgacgacagccacacctttgggcatggaaactgctttggtccccagactgcggcaatcgatcagcaaggcatgatctttcttgccgagcgcggaaattagctgatccatgatcccgcagttacagcctacaaactggttttctgcttcctgaccgttaagcgcgatttgtgcgccgtccagcggcagatgataaagctgctgcaatacggttccgaccgcgacttccagactagcggaagaacttaacccggcaccctgcggcacattgccgctgatcaccatgtccacgccgccgaagctgttgttacgcagttgcagatgtttcaccacgccacgaacgtagttagcccattgatagttttcatgtgcgacaatgggcgcatcgagggaaaactcgtcgagctgattttcataatcggctgccatcacgcgaactttacggtcatcgcgtggtgcacaactgatcacggtttgataatcaatcgcgcagggcagaacgaaaccgtcgttgtagtcggtgtgttcaccaatcaaattcacgcggccaggcgcctgaatggtgtgagtggcagggtagccaaatgcgttggcaaacagagattgtgttttttctttcagactcatttcttacactccggattcgcgaaaatggatatcgctgactgcgcgcaaacgctctgctgcctgttctgcggtcaggtctcgctgggtctctgccagcatttcataaccaaccataaatttacgtacggtggcggagcgcagcagaggcggataaaagtgcgcgtgcagctgccagtgttgattctcttcgccattaaatggcgcgccgtgccagcccatagagtaggggaaggagcactggaagaggttgtcataacgactggtcagctttttcaacgccagcgccagatcgctgcgctgggcgtcggtcaaatcggtgatccgtaaaacgtgggctttgggcagcagtagcgtttcgaacggccaggcagcccagtaaggcacgacggctaaccagtgttcggtttcgacaacggtacggctaccgtctgccagctcgcgctgaacataatccaccagcattggacttttctgttcggcaaaatattctttttgcaggcggtcttcgcgctcagcttcgttaggcaggaagctatttgcccaaatctgaccgtgcggatgcgggttagagcagcccatcgccgcgcctttgttttcaaaaacctgcacccatgggtacgttttccccagttctgcggtttgctcctgccaggttttgacgatttccgtcaatgctgcaacgctgagctctggcagcgttttactgtgatccggactaaagcagatcacccggctggtgccgcgcgcgctctggcaacgcatcagcggatcgtgactttctggcgcatctggcgtgtcagacatcaaagccgcaaagtcattagtgaaaacgtaagtcccggtgtaatcggggtttttatcgcctgtcacccgcacattacctgcgcagaggaagcaatctggatcgtgcgcaggtaacacctgtttggctggcgtttcctgcgccccctgccaggggcgcttagcgcggtgcggactaaccagaatccattgcccggtgagcgggttgtagcggcgatgtggatgatcaacgggattaaattgcgtcatggtcgttccttaatcgggatatccctgtggatggcgactctgccagtgccaggtgtcctgcgccatttcatcgagtgtgcgcgttacgcgccagttcagttcacggtcggctttgctggcgtccgcccagtaggccggaaggtcgccctcgcgacgcggtgcaaaatgataattaaccggtttgccgcaggctttgctgaaggcattaaccacgtccagcacgctgttgcctacgccagcgccgaggttgtagatgtgtacgcctggcttgttcgccagtttttccatcgccacgacgtgaccgtccgccagatccattacgtggatgtaatcgcgtacgccagtaccatcttcggtcggataatcgttaccaaaaatcgccaggctgtcgcgacggcctacagcaacctgggcgatgtatggcatcaggttattcggaatgccttgcggatcttcgcccatatcgccgctcggatgcgcgccaaccgggttgaagtagcgcagcagggcaatgctccagtccggctgggctttttgcagatcggtgaggatctgttccaccatcagcttgcttttgccgtaagggctttgcggtgtgccggtcgggaagctttcaacgtatggaattttgggctgatcgccataaacggtggcggaggagctaaaaataaagtttttgacgttagcggcgcgcatggcgctaatcaggcgcagagtgccgttgacattgttgtcgtaatattccagcggtttttgtacgctttcgcccacggctttcagcccggcgaagtggatcacggtgtcgatagcgtgatcgtgcaggatctcggtcatcaacgcttcgttacgaatatcgccttcaacaaacgttggatgtttgccgcctaaacgctcgataacaggcagtacgatgcgcttactgttacagaggttatcaagaatgatgacatcatgaccgttttgcagtaattgcacacaggtatgacttccaatgtaaccgctaccaccggtaaccagaactctcataattcgctccattaggcttatggtatgaaataaccatagcataacaaagatgcgaaaagtgtgacatggaataaattagtggaatcgtttacacaagaatttagccgttttttatgcgcgattaagtgattataaaacagagggtttatgaatgattgcgctttttatctgaaaaaagacgcggtttcatgcctgcatgcgtcgaaccgttggccggagagggtgctaaggccgcctccggcaaggtcagcactaccgactcaatatatttttgtcagcacatagcgatagagtccaccgtccggcacgaactcaagacgatgggtaatacaggcaggcgcatcttcagcgtggtggctaacaaacaacaattgcgtttcaccttcgctaatcagcacatcaacaaaacggcggataagctggcgattcagcggatcaagcccctgtagtggttcatcgagaataagcaacgtcggatgtttcaccagtgcgcggacaatcagcgccagacgctgctgtccccaggaaagactatggaacggagcgtcagccgtgcgtttatcaatgccgagaatatccagccactgctgcaccagtttttgctggcgatcgctaacggcctgataaatgccaatgctatcaaaatagccagaaagaatcacattacgcacggtagtgctgacccggtaatccagatgcaaactactgctgacgtaaccgatatgctttttgatatcccagatggtttcgccgctgccgcgacgtcgtccgaaaagcgtcaaatcgttgctgtaaccttgcggatgatcgccagtaaccaggcttaataacgtgctttttcctgcaccatttggcccgacaatttgccagtgttcgcctggattcacctgccagctaaggttattaagaatggggcgatcgttataagaaaccacgccattgttcagcacaatgcgcggttcgttggcgggtaaggcgtgacgtgcactaggttcatccggctccggcagttgcacaccttcaagctgttcactatgcgccagttgcgcgacgagtgcttgttggagcagttcctctttagcgccagtttccgctaacgtgcaatccgccagcacgccagcaaactggacaaactccgggatctcatcgaagcgattgagcaccagtaccagagtaataccggactgatgtaagctggcgagtcgctcagccagctgctgacgactggcaacatccaggccatcgaacggctcatcaagaatcaacaagtcaggctcgctcatcagcgcctgacacagcagggtttttcgcgtctcgccagtggaaaggtatttaaagcgtcggtcgaggagggcggtaataccgaactgctgcgccagttgcatgcaacgcggtgcatcctttacttcatcctgaatgatctcagccgtagtgcgtccggtgtcatcttcgccagggccgagcatatcggtgttattccgctgccattcgtcgctgacgagtttttgcaattgctcgaaggagagacgagtgatgtgggaaaactggctttgccgttcacctttcaaaagcggaagttcccccgccagcgcgcgggccagggcgcttttcccgcttccattgctaccgacaaacgcccaactatcacccgcgtttaacgttagctgaggcaattgcagcgtttttgtgtcgctaagacgaaacgtgccttgcaaaatttgcaagctactcattttatatcccactttgtgcagcgattactgacagggatacgtgtttcataacaaattgtcaacacgcttagcacagcgtggcgataatcacgctgtcggcattaaagtaggccgtgacattctgtccttgctgaagagaagtcgcttcatttaccggcactgtggcgcacagtgtttgcccgtcgggtagcgccattaatacttcgcactgctctgcgccgcgctcaatatgactaataatacccggtaattggttgtcagcgttttgcgcgaccgcctcgtcctgagtaatacctacccacggcgcttttagcaatatcaacacttctttgccttcatccagccccagacgcgcgccgctttgtgcggtaattgcgactttcaggcgtgtttttccgtcagccagtaagacatcaacatgctgttgaacgtcatcatgatcgcgggcggtgatggtaccgaaccactggttacgggcgctggtttgcagactaaaacgactgatcgcggccagcaggctgttcagcggcagggcgtcatcgtcacttaacacatcaaaggctttttgctggatttgcgccagtaagtcatagagctgaatcagtcgctgaccatagcgggtcagtactgcgccgccgccacctttaccgcctgttgcgcgctcgaccagaatatgctcacttaactgattcatctcgttaatggcatcccaggcgcttttatagctaataccggcatctttcgctccctggctaatggaaccggaaagcgcaatgtgttttagtaggctaatgcggcgcgggtcggcgaataatttttgttggagcttaagggtgagaaggatttcggcctgcataacaatgtcctggcaaaagtcttattgtgacggaaaacgaacgccacgcaaagctgaccgcacaaaaggggagtgcttttctgtgcttagcggttagaatagtctcatgactatatctggagttgaccatgttagagttattaaaaagtctggtattcgccgtaatcatggtacctgtcgtgatggccatcatcctgggtctgatttacggtcttggtgaagtattcaacatcttttctggtgttggtaaaaaagaccagcccggacaaaatcattgattccctgaatgcccgcttagtcgggcattttctttttctcaacttcctgcttttcctgccgatattttttcttatctacctcacaaaggttagcaataactgctgggaaaattccgagttagtcgttatattgtcgcctacataacgttacattaaggggttaccaatggctcgtaaatggttgaacttgtttgccggggcggcactctctttcgctgttgctggcaatgcactggcagatgaagggaaaatcacggtgttcgccgccgcaagtctgactaacgcaatgcaggacattgctacgcagtttaaaaaagagaaaggcgtggatgtggtttcttctttcgctagcagttctactctcgcccgtcagattgaagcgggtgcgcctgcggatctgtttatttctgccgatcagaaatggatggattatgcggttgataaaaaagcgatcgatacagctacgcgtcagacactgctcggcaatagcctggtcgttgtagcaccgaaagccagcgtgcagaaagatttcaccatcgacagcaaaaccaactggactagtctgctgaatggcggtcgcctggcggttggcgatccggaacatgttcccgctggcatttatgcaaaagaagcactgcaaaaactgggcgcatgggatacgctctctccgaaactggccccagcggaagatgttcgtggggcgctggcgctggtcgaacgtaacgaagcgcctctgggcattgtctacggttctgacgcagttgccagcaaaggggtaaaagtggttgccaccttcccggaagatagtcataaaaaagtggaatatccggttgctgttgtggaagggcataacaatgcgacagtgaaagcattttatgattatctgaagggaccgcaggcagcggaaatctttaaacgttacggatttacaatcaagtaatgatactgaccgatccagaatggcaggcagttttattaagcctgaaagtttcttccctggctgtgctgtttagcctgccgtttgggatcttttttgcctggttactggtgcgttgcacgtttccgggcaaagctctgctcgacagcgtactgcatctaccgctggtgttaccgcccgtggtcgtcggttacttattattagttagcatgggacggcgcggatttatcggtgaacgtctgtatgactggtttggtattaccttcgcctttagctggcgcggcgcggttctcgctgccgccgtcatgagctttccgctgatggtgcgggcaattcgtctggcgctggaaggggttgatgtcaaactggaacaggccgcaagaacactgggggccgggcgctggcgcgttttctttactatcacgttaccgctgaccttaccgggaattattgttggtacggtactggcttttgctcgttctctcggtgagtttggtgcaaccatcacctttgtgagcaacattcctggtgaaacgcgaaccattccttctgccatgtataccctgatccagacccccggcggggaaagtggagcggcgagactgtgcattatttctattgcgctggcgatgatctccctgttgattagtgaatggctggccagaatcagccgtgaacgggcggggcgctaatcatgctggaactgaatttttcccagacgttgggcaaccattgcctgactattaatgaaacgctgcccgccaatggcatcactgctatctttggcgtctccggtgccggaaaaactagcctgattaacgccatcagtggactgacgcgcccgcaaaaagggcggattgtcctcaatgggcgggtactaaatgatgccgaaaaaggtatctgcctgacgccggaaaagcgtcgcgttggctatgtttttcaggatgcgcggctgttcccgcattacaaagtgcgtggcaatctgcgctacggcatgagcaaaagtatggtcgatcagttcgataagctggtggcgcttttaggcattgaaccgttgcttgaccgtttaccaggcagcctgtccggaggcgaaaaacagcgcgtggcgattggtcgggctttgctgacagcaccggaattgctgttgctggatgaaccgctggcgagtctggatattccgcgtaaacgcgaactgttgccttatctgcaacggctgacacgggaaatcaacattccgatgttgtatgtcagccatagcctggatgagatcctccatctggcagacagagtgatggtactggaaaacggtcaggtgaaagcctttggcgcgctggaggaagtgtggggcagtagcgtgatgaatccgtggctgccgaaagagcaacaaagtagcattctgaaagtgacggtgcttgagcatcatccgcattacgcgatgaccgcgctggcgctgggcgatcagcatttgtgggtcaataagctggacgaaccgctgcaagctgcgctacgtatccgcattcaggcttccgatgtttctctggttttacaaccgccgcagcaaaccagcattcgtaacgtattgcgggcaaaagttgttaatagttatgacgacaacggccaggtggaagtggaactggaagtcggcggtaaaacgctgtgggcgcgtatcagcccgtgggccagggatgaactggcgatcaaacctggcctgtggctgtacgcgcaaattaaaagtgtgagcataaccgcctgattaaatcaggtggctataaatgaactgggcaatgctgtcggtggtgttatcaccaatcacaatgttggcgcgcgcttttaccgcgtcatcggcgttgcccatcgccacgcctgtaccagcggcttccagcatactgatatcattaaagttatcgccgaatgccacgacgttttccatgctccaaccttgcgcctcaacccatttcgtcaaacgtttacctttgctgttgccgccgcgtgcaatatcaacctgatcgtgccaggaccattcacactccagtcccagttcatgttcgacatgcttaccaaaatgctgcaattgcggcaggtcatcgtgcgtcagggcgaacttccatacggcgttaacttgttgcgccgtttcagccagagaagcgacttgtgtgaaagtcggacgctgttccggcggcagggtttgcgcccagttagatgtgcgaatgacatgcccggtcgggtgctcatagaccattgcatcatcgacatacatcagaccgtgaatgtggtgttcattcagcatctcaatgagttgcagggctttaataacgggcattgggtccgcttccagcacggtttttgcatgataatcatacaaataggtgccattacagcaaatagcaggtgtatccagcgccagcgcctgataaaaaggatgaatagcgacgtgatggcgacctgtgacgatgattaattgatagcctgcttcgcgagcgcgggccagggcttctatgctactaggaagcagggtctttttcggggtcaataaggtgccgtctaagtcgagagcaatcacgcgtgtggtcatggcgtattccagattaaggttaagaattttcgtctgcgcgaatggtacaccgataccactatcggacaaaattctgcgttttaattcagcattcaccgccaaaagcgactaattttagctgttacagtcagttgctaaatgcaaaggagcattcatgaagcaaacagtttatatcgccagccctgagagccagcaaattcacgtctggaatctgaatcatgaaggcgcactgacgctgacacaggttgtcgatgtgccggggcaggtgcagccgatggtggtcagcccggacaaacgttatctctatgttggtgttcgccctgagtttcgcgtcctggcgtatcgtatcgccccggacgatggcgcactgacctttgccgcagagtctgcgctgccgggtagtccgacgcatatttccaccgatcaccaggggcagtttgtctttgtaggttcttacaatgcgggtaacgtgagcgtaacgcgtctggaagatggcctgccagtgggcgtcgtcgatgtggtcgaggggctggacggttgccattccgccaatatcagtccggacaaccgtacgctgtgggttccggcattaaagcaggatcgcatttgcctgtttacggtcagcgatgatggtcatctcgtggcgcaggaccctgcggaagtgaccaccgttgaaggggccggcccgcgtcatatggtattccatccaaacgaacaatatgcgtattgcgtcaatgagttaaacagcagtgtggatgtctgggaactgaaagatccgcacggtaatatcgaatgtgtccagacgctggatatgatgccggaaaacttctccgacacccgttgggcggctgatattcatatcaccccggatggtcgccatttatacgcctgcgaccgtaccgccagcctgattaccgttttcagcgttagcgaagatggcagcgtgttgagtaaagaaggcttccagccaacggaaacccagccgcgcggcttcaatgttgatcacagcggcaagtatctgattgccgccgggcaaaaatctcaccacatcagcgtatacgaaattgttggcgagcaggggctactgcatgaaaaaggccgctatgcggtcgggcagggaccaatgtgggtggtggttaacgcacactaaccgctgatttacccggcgcagtctctcctgcgccggtgtattaacctatctcctgtaacgcgtgtctctggcgttcgacgatattggtccacaaattgtctttatcgtcagtccataaattaatcagcaaggcaaaaaagcgttctgctgctggagaaagtacggcatctttacggcgaattattcccaatgttcgacgtataacgggttccaccaatgggataccaataatgctagaatagggcgcatgaggcattgccaggccaggaagcgcgctaatccccagtcccgcctccaccagtcctaaactcgtgctaagatgacgcacttcgtaaaaccagtccagcttccagggcttgtcggccagctgttgttctatcaacagtcggttgccgctggaggagcgtacgccaatcattttgtaacccactaactcctgccattctacaagctgctttttggccaatggatggtcacgccgacaggccagcacgaacggctcgttgaccagtggggtaaaatcaatggaactatttgtgacgttgttcatgtttatgccaaagtcactttcgttacacagcacgctttccatgcaattattcgtgccttgttccagaatccgcactttaatattgggatacagctcattaaatttaccgattgccagcggtaaaaaataaaatactgcggtcggaatacacgctaacgtcaccataccacgatgataagcattcatatcacgaatattaaaaagcgtttcatcgaatttctttattaattcccgcgcctccgggagcaacctttttcctgcttttgttaacgtaaccttgcgagttgtacgctcaaatagttgaacatgtaaatcttcctccatcttttttattcttcgcgttaatgcaggttgcgtaatattgagtaatttagcggcattgttaaagctactggactctgccagtatgacaaatgccttcatactacttaattcatgcttcattattactccggaaaatggaaggctgctttttgggtggctggccgttaaaaattttaactgcatttagccaacttaaattaatgaaaaaatgttattaatcgttgagctaaagtcattagagatgctttgcccttaatgtaaccatatcgcaataagttatgtttttaaattgagggcattattatgaaaaaaataccctgcgtgatgatgcgaggtggaaccagcaggggcgcgttcctgttagcggaacatttacccgaagatcaaacgcagcgcgataaaatattgatggcaattatgggttccggtaacgatctggaaattgacggtattggcggcggtaatccactgaccagtaaagtcgccattattagccgttccagcgatccgcgtgctgatgtcgattatctgtttgcgcaggtaatcgttcatgagcaacgtgtcgataccacgcctaactgcggcaatatgctgtctggtgttggggcattcgccattgaaaatggtttgattgcagcgactagcccagttactcgcgtacgtatccgcaacgtcaatacgggtacgttcatcgaagctgatgtgcaaacgccaaatggtgttgtcgagtacgagggtagcgccagaattgacggcgtaccgggtactgccgcaccggttgcgctcactttcctgaatgccgctggaaccaaaaccggaaaagttttcccgactgataatcagattgattattttgacgatgtcccggtgacctgtatcgatatggcgatgccagtcgtcattattccggctgaatatctgggaaaaacaggttatgaattaccggcggaactggatgccgacaaagcattattagcccgcattgaatctatccgtctacaagcgggtaaagcaatgggcttaggtgatgtcagtaatatggttatccctaaacctgtgcttatttctccagcgcagaaaggcggggcaattaatgtgcgttattttatgccgcattcttgccatcgcgcgctggcgataaccggtgctattgctatttccagtagttgtgcattggaaggcaccgtcacccgacaaatcgtcccttctgtaggatacggcaatatcaatattgaacaccccagtggtgcgctcgacgttcatttaagtaatgaaggtcaggatgccacgacgttacgcgcatctgttattcggacgaccagaaaaatattttccggtgaagtttatcttccctgaaaaaattcgttgtcaggataaggacaatcaataaaggacttctgtatgagtcatacagaaagaacaggattttaaatgaataagaaaagcttatggaagctaattctgatattagcgatcccatgtattattggttttatgccagctccggcaggattaagcgaactggcgtgggtgctttttggtatttacctggcggccattgtggggctggttatcaagcctttcccggaacctgtcgtactgttaattgccgttgctgccagtatggtggtggtcggtaacttatccgacggtgcgtttaaaaccaccgccgtattaagcggttactctagtggtaccacctggctggtgttcagcgcgtttaccttaagcgccgcatttgtgaccaccggtttaggtaaacgtattgcctatctgctgattggtaaaatcggtaacaccacgctgggtctgggttacgttacggtattcctcgatctggtactggctccggcaacaccgtctaacaccgcgcgtgcgggcggcattgtgttaccgatcatcaacagcgtggcggtggctttggggtccgaaccggaaaaaagtccgcgtcgtgtcggacattacctgatgatgtccatttacatggtcaccaaaaccaccagctatatgttctttaccgcaatggcggggaacattctggcgctgaaaatgatcaacgacattctgcacctgcaaattagctggggtggatgggcgctggcagccggattgccgggcatcattatgctgctggtcaccccgctggtgatttacaccatgtatccaccagaaattaagaaggtggataacaaaaccatcgctaaagcgggccttgccgaactaggaccgatgaaaatccgcgaaaaaatgctgctcggtgtctttgtgctggcgctgctgggctggattttcagtaagtctctgggggttgatgaatccaccgtggcaatcgttgttatggcaaccatgctgctgctgggtatcgttacctgggaagacgtggttaaaaataaaggcggctggaataccttaatctggtacggcggtattatcggcttaagctccttattaagcaaagttaaattcttcgaatggttagctgaagtctttaaaaataacctggcatttgatggtcacggtaacgttgctttcttcgttattattttcctcagcattatcgtgcgttatttcttcgcttccggtagtgcctatatcgttgctatgttaccggtatttgccatgctggcgaacgtctccggcgcaccgttaatgttaaccgcgctggcactgttgttctccaactcctatggcggcatggttactcactatggcggcgcggcaggtccggtcatctttggcgtgggttataacgatattaaatcctggtggttggtcggtgcggtactgacgatattaaccttcctggtgcatatcaccctcggcgtgtggtggtggaatatgctgatcggctggaacatgctgtaaatattctcgtcatacttcaagttgcatgtgctgcgtctgcgttcgctcaccccagtcacttacttatgtaagctcctggggattcactcgcttgtcgccttcctgcaactcgaattatttagagtatatccatttattatctttctgcgcacttcacggtgcgcagatatctggagcatttgatgatcaagttatctgaaaaaggcgtgtttctcgccagtaataacgaaataattgccgaagaacatttcaccggcgaaattaaaaaagaagaagccaaaaaaggcactattgcctggtctattctctctagccataatacgtccggaaatatggataaacttaaaattaagtttgatagtttagcctctcacgatattacctttgttggtattgtacagaccgctaaagcgtccggtatggaacgtttcccgctgccgtatgtgctgaccaactgccataacagtctctgcgccgtcggcggcactattaacggtgatgaccatgtttttggtttaagcgcggcccagcgttatggcggtatttttgtgcctccgcatattgcggtcatccatcaatatatgcgtgagatgatggcaggcggcggcaaaatgatcctcgggagtgacagccacacccgttacggtgcattagggacaatggcagtcggtgagggcggcggtgagttggtaaaacagctgcttaatgacacctgggatatcgactatccgggcgtggttgcggtgcatctgaccggaaaacctgcgccgtatgtggggccacaggatgtggcgctggctatcattggcgcggtgttcaaaaacggttacgtcaaaaacaaagtcatggagttcgttggaccgggcgttagcgcgctctctaccgatttccgtaacagcgttgacgtgatgaccactgaaacgacctgtttaagttctgtctggcaaaccgatgaagaagtccataactggctggcgctgcacggtcgcggccaggattactgccagcttaaccctcaaccgatggcgtactacgatggctgcatcagcgttgatttaagcgccatcaaaccaatgattgcgctgccgttccacccgagcaacgtgtatgaaatcgacacactgaaccagaacctgaccgacattctgcgtgagattgaaattgagtccgaacgcgtggcgcacggtaaagccaaactcagcctgctggataaagtggaaaatggtcgcctgaaagtgcagcaggggattatcgcgggctgttctggcggtaactacgaaaacgtcatcgcggcggcgaatgcactgcgcggtcaatcctgtggcaatgacaccttcagcctggcagtttacccgagtagtcagccggtgtttatggatctcgccaaaaaaggtgtggtagcagatttgattggcgcaggcgcaatcatcagaaccgcgttctgcggcccatgctttggcgcgggcgatacgccaatcaacaacggtttgagtattcgccacaccacgcgtaacttcccgaaccgcgaaggctctaagccagctaatgggcagatgagtgcggtggcgttgatggacgctcgttctatcgctgcgactgcggcaaacggtggctatttaacctctgccagcgaacttgattgctgggacaacgtgccggagtacgccttcgatgtaacgccgtataaaaaccgtgtttatcagggctttgtgaaaggggcaactcagcaaccgctgatttacgggccgaacattaaagactggccggaattgggtgcgctgactgacaatatcgtcctgaaagtgtgcagcaagatcctcgacgaagtgaccaccaccgacgaactgattccttccggtgaaacctcttcttatcgtagtaatccgattggtctggcggagtttaccctgtctcgccgcgatcccggttatgttagcagaagtaaagcgactgctgagctggaaaatcagcgtctggcggggaatgtcagcgagctgacagaggtgtttgcgcgcattaagcagattgctggtcaggagcatattgatccgctgcaaactgaaattggcagcatggtctatgcggtgaaaccaggcgatggttctgcgcgtgaacaggcggcgagctgccagcgtgtgattggcggtctggcgaatattgccgaggagtacgcgactaaacgctatcgttctaacgtcatcaactgggggatgttaccgctgcaaatggcggaagtaccaacctttgaagtgggggattacatttacatccctggcattaaagcggcgctggataatccgggtacgacgtttaaaggttatgtgatccatgaagatgcgccggtaacggaaattacgctctatatggaaagtctgactgctgaagagcgcgagattatcaaggcgggtagtttgattaacttcaataaaaaccgtcagatgtaaaaagcgccatgtgaatgtaggtcgcattcggcacttattgtcggatgcgatgcttgcgcatcttatccgacctacgaatcgcatcgaatctgtaggccagataaggcattttcgcagcatccggcacttattgtcggatgcgatgcttgcgcatcttatccgacctacaaatcgcatcgaaccgtaggccggataaggcgtttacgccgcatccggcaaatagttaattgcccttacttcttcgcctctgcaaccactttactacccacgccgcggttattgtattcccacatgcggttgtagttagtgtcattcagattgcgctgtatttcgtcgttatcatctacgctgccggtattacccgcaaacggacgattagagatcaccgcatcggcccacggtttagccgtgttaaaaccttcgttgatggcgctatcacggatcaccacctgaccgttggtattggcatcaacatccaggctgcggcccagttgcgccacaccatcaccgaaagcattgaaacggctgtttacggcgaggaaaccgtagtaaatgttggacagcgtagccggtgcaaacacatacgcttcttgctgagtacgactgttcaccacgcggaattcggtgttatcgaacaccactgcgccgcgaccagaaacgatatccacatccccttcaatgtagctgttggtcaccagcgtacgcggctgacgattcgtttccagacggttctgcacaccgctgttggtgacaaagaaggtgttctgacgaccgagaatgttaacgttgttaatctgtacctggtcaccatcagtacgcagtgccaccgccggatggttacctgcatctacgctatcgcccagcgtgttttcgatggtcagattttgcagttgcaggccattgttttgactccagaagaccgcagagcagagaacaccgatactgtcgctgcgtttgctctggcagctatcgtacatataccacgctggtttacctggcatatatttgccgcgcgggttgacgtcgtgacgccagtcggcagggctcatgccaccattaagggaaagcccaatcttcacatcaatcggtttttcacctgtaccgtacagagtaattccacccggagcggcagggacatataccgttccctgatactcaccaggcatcacggcaatatactggcgcttgttggtacgcttgataattgccgcatctaccgccgcctgaatcgtggtatgcgttacaccttgagtgcccgccgggccgacaacaaagtcaggttgcgcaggcagggtaatcggggaaggattccacgctgcagcacctggtgtcagggatgcaaaatagtgttgagcatcgaaattctgcgcttcttttgcgctcagaatcgggcgagaagaggtaccaggcgcggtttgatcagaaggacgttgatcgggcggggtactgctacaggcggtcagcgtcacgccaaaagccaatgccagcgccagacgggaaacactaaatgtgttcacaggttgctccgggctatgaaatagaaaaatgaatccgttgaagcctgcttttttatactaacttgagcgaaacgggaaggtaaaaagacaaaaagttgtttttaatacctttaagtgataccagatggcattgcgccatctggcagagtgattaactaaacatcgcagtaatgctggcgcttgccagagagtggaaatgaacgttaaacccgaccatcgcgccgctggcaccttcatcgatatcaatacgttctatatccagcgcgtgaacggtaaaaatgtagcgatgagtttcgcctttcggcggtgctgcgccatcgtacccggttttaccaaagtcggtacgcgtctgcaaaacgccgtctggcattgctaccagaccagagccaaacccttgcggtaatacgcgggtatcagcgggtaagttaacaactacccagtgccaccagccggagccggttggcgcatccgggtcgtagcaggtgacaacaaaacttttcgttcccgcaggaacatcatcccacgccagatgcggactaatattatcgccatcgtaacccatgccgttaaagacatgacgatgcggcaatttatcgccatcgcgcagatcgttactgatgagtttcatgaaccctcctttcttgtttgcagaaagtgtagccagaaaccctcacgcggacttctcgttattggcaaaaaaatgtttcatcctgtaccgcgcggttaaccgctgcggtcagacgctgcaactgttgcgggagaataatatagggcggcatcaggtaaatcagtttgccaaaaggccggatccagacaccctgttcgacaaagaatttttgcagcgccgccatattcaccggatgagtggtttcgaccacgccaatggcccccagtacgcgcacatcggcaaccatttcggcatcacgggcgggggcaagttgctcgcgcagctgtacttcaatatccgccacctgttgctgccagtcgccagattcgagaatcgccaggctggcgtttgctgccgcgcaggccagcggattgcccataaaagttggcccatgcataaagcaaccggcttcaccgttactgatggtttctgcaacctcgcgcgtggtgagtgtggcggaaagggtcattgtgccgccggttaaggctttaccgaggcacaaaatgtccggcgcgatttctgcatgttcacaggcaaacagtttcccggtacgaccaaatccagtggcgatctcgtcggcaatcagcaagataccttcgcgatcgcatattttgcggattcgttttaaccattccggatggtacatgcgcatcccgcctgcgccctggacaatcggctcaatgatcaccgccgcgatttcatgacgatgcgccgccatcaggcgggcaaagcccaccatatcgcgctcatcccattcgccatccatgcggctttgcggggcgggagcaaacaggttttctggcaggtagcctttccacagactgtgcatactgttatccggatcgcacacgctcatcgcgccaaaggtatcgccatgataaccattgcggaaggtcagaaaacgctggcgcgcttcgcctttggcttgccagtactgcaacgccattttcatcgccacttccaccgctacggaaccggagtccgcgagaaaaacgcactccagcggttgcggcgtcatcgccaccagtttgcggcacagctcaatggctggcgcatgggtgataccgccaaacatcacatggctcatggcatcaatttggctcttcatcgccgcattaagctgcgggtgattgtagccgtggatcgccgcccaccaggagctcataccgtcaaccaggcgtctgccgtcagacaaaatcagctcgcaaccttcggcgctcaccaccggataaaccggcagaggggaggtcatggatgtgtatgggtgccagatatggcgttggtcaaaggcaagatcgtccgttgtcataatcgacttgtaaaccaaattgaaaagatttaggtttacaagtctacaccgaattaacaacaaaaaacacgttttggagaagccccatggctcaccgcccacgctggacattgagccaagtcacagaattatttgaaaaaccgttgctggatctgctgtttgaagcgcagcaggtgcatcgccagcatttcgatcctcgtcaggtgcaggtcagcacgttgctgagcattaagaccggagcttgtccggaagattgcaaatactgcccgcaaagcagccgctacaaaaccgggctggaagccgagcggttgatggaagttgaacaggtgctggagagcgcgcgcaaagcgaaagcggcaggaagcacgcgcttctgtatgggcgcggcgtggaagaatccccacgaacgcgatatgccgtacctggaacaaatggtgcagggggtaaaagcgatggggctggaggcgtgtatgacgctgggcacgttgagtgaatctcaggcgcagcgcctcgcgaacgccgggctggattactacaaccacaacctggacaccagcccggagttttacggcaatatcatcaccacacgcacttatcaggaacgcctcgatacgctggaaaaagtgcgcgatgccgggatcaaagtctgttctggcggcattgtgggcttaggcgaaacggtaaaagatcgcgccggattattgctgcaactggcaaacctgccgacgccgccggaaagcgtgccaatcaacatgctggtgaaggtgaaaggcacgccgcttgccgataacgatgatgtcgatgcctttgattttattcgcaccattgcggtcgcgcggatcatgatgccaacctcttacgtgcgcctttctgccggacgcgagcagatgaacgaacagactcaggcgatgtgctttatggcaggcgcaaacagcattttctacggttgcaaactgctggccacgccgaatccggaagaagataaagacctgcaactgttccgcaaactggggctaaatccgcagcaaactgccgtgctggcaggggataacgaacaacagcaacgtcttgaacaggcgctgatgaccccggacaccgacgaatattacaacgcggcagcattatgagctggcaggagaaaatcaacgcggcgctcgatgcgcggcgtgctgccgatgccctgcgtcgccgttatccggtggcgcaaggagccggacgctggctggtggcggatgatcgccagtatctgaacttttccagtaacgattatttaggtttaagccatcatccgcaaattatccgtgcctggcagcagggggcggagcaatttggcatcggtagcggcggctccggtcacgtcagcggttatagcgtggtgcatcaggcactggaagaagagctggccgagtggcttggctatagccgggcactgctgtttatctctggtttcgccgctaatcaggcagttattgccgcgatgatggcgaaagaggaccgtattgctgccgaccggcttagccatgccagtttgctggaagctgccagtttaagcccgagccagcttcgccgttttgctcataacgatgtcactcatttggcgcgattgcttgcttccccctgtccggggcagcaaatggtggtgacagaaggcgtgttcagcatggacggcgatagtgcgccactggcggaaatccagcaggtaacgcaacagcacaatggctggttgatggtcgatgatgcccacggcacgggcgttatcggggagcaggggcgcggcagctgctggctgcaaaaggtaaaaccagaattgctggtagtgacttttggcaaaggatttggcgtcagcggggcagcggtgctttgctccagtacggtggcggattatctgctgcaattcgcccgccaccttatctacagcaccagtatgccgcccgctcaggcgcaggcattacgtgcgagcctggcggtcattcgcagtgatgagggtgatgcacggcgcgaaaaactggcggcactcattacgcgttttcgtgccggagtacaggatttgccgtttacgcttgctgatagttgcagcgccatccagccattgattgtcggtgataacagccgtgcgttacaactggcagaaaaactgcgtcagcaaggctgctgggtcacggcgattcgcccgccaaccgtacccgctggtactgcgcgactgcgcttaacgctaaccgctgcgcatgaaatgcaggatatcgaccgtctgctggaggtgctgcatggcaacggttaataaacaagccattgcagcggcatttggtcgggcagccgcacactatgagcaacatgcagatctacagcgccagagtgctgacgccttactggcaatgcttccacagcgtaaatacacccacgtactggacgcgggttgtggacctggctggatgagccgccactggcgggaacgtcacgcgcaggtgacggccttagatctcagcccgccaatgcttgttcaggcacgccagaaggatgccgcagaccattatctggcgggagatatcgaatccctgccgttagcgactgcgacgttcgatcttgcatggagcaatctcgcagtgcagtggtgcggtaatttatccacggcactccgcgagctgtatcgggtggtgcgccccaaaggcgtggtcgcgtttaccacgctggtgcagggaagcttacccgaactgcatcaggcgtggcaggcggtggacgagcgtccgcatgctaatcgctttttaccgccagatgaaatcgaacagagcctgaacggcgtgcattatcaacatcatattcagcccatcacgctgtggtttgatgatgcgctcagtgccatgcgtagcctgaaaggcatcggtgccacgcatcttcatgaagggcgcgacccgcgaatattaacgcgtagccagttgcagcgattgcaactggcctggccgcaacagcaggggcgatatcctctgacgtatcatctttttttgggagtgattgctcgtgagtaaacgttattttgtcaccggaacggataccgaagtggggaaaactgtcgccagttgtgcacttttacaagccgcaaaggcagcaggctaccggacggcaggttataaaccggtcgcctctggcagcgaaaagaccccggaaggtttacgcaatagcgacgcgctggcgttacagcgcaacagcagcctgcagctggattacgcaacagtaaatccttacaccttcgcagaacccactagcccgcacatcatcagcgcgcaagagggcagaccgatagaaagtttggtaatgagcgccggattacgcgcgcttgaacaacaggctgactgggtgttagtggaaggtgctggcggctggtttacgccgctttctgacactttcacttttgcagattgggtaacacaggaacaactgccggtgatactggtagttggtgtgaaactcggctgtattaatcacgcgatgttgactgcacaggtaatacaacacgccggactgactctggcgggttgggtggcgaacgatgttacgcctccgggaaaacgtcacgctgaatatatgaccacgctcacccgcatgattcccgcgccgctgctgggagagatcccctggcttgcagaaaatccagaaaatgcggcaaccggaaagtacataaaccttgccttgttgtaaccattctgtatttggttaaattgcgagcgagatcgcgtcttcgattgactgcaatttaaccaattaaattctaaaataatcacgaaaaaaattttacttccgcctcatgcggcgaatgtgggaattgcccaggcggcgggggataggggctggagacagttatccactattcctgtggataaccatgtgtattagagttagaaaacacgaggcaagcgagagaatacgcggcttgcacgcgaattggcgttaaagacggctcaaagaaatatcttttattttttaactggttagataaatgcaatggcagtcactgaacaggcatctcttgccataaaactgtcatcactcatcttgacaaatgttaaaaaagccgttgctttggggataacccggtaaggccggagttttatctcgccacagagtaaattttgctcatgattgacagcggagtttacgctgtatcagaaatattatggtgatgaactgtttttttatccagtataatttgttggcataattaagtacgacgagtaaaattacatacctgcccgcccaactccttcaggtagcgactcatgagtaaaccgttcaaactgaattccgcttttaaaccttctggcgatcagccagaggcgattcgacgtctcgaagaggggctggaagatggcctggcgcaccagacgttacttggcgtgactggcagtgggaaaaccttcaccattgccaatgtcattgctgaccttcagcgcccaaccatggtacttgcgcccaacaaaacgctggcggcccagctgtatggcgaaatgaaagagttcttcccggaaaacgcggtggaatatttcgtttcctactacgactactatcagccggaagcctatgtaccgagttccgacactttcattgagaaagatgccagcgttaacgaacatattgagcagatgcgtttgtccgccaccaaagcgatgctggagcggcgtgatgtggttgtggtggcgtctgtttccgcgatttatggtctgggcgatcctgatttatatctcaagatgatgctccatctcacggtcggtatgattatcgatcagcgcgcgattctgcgccgactggcggagctgcaatacgctcgtaatgatcaagcattccagcgtggtactttccgcgttcgtggcgaggtgatagatatcttcccggcagaaagcgatgacattgcacttcgcgtggaactgtttgacgaggaagtggaacgattgagcttatttgacccgctgaccgggcagattgtttccactattccacgttttaccatctacccgaaaacgcactacgtcacaccgcgcgagcgcatcgtacaggcgatggaggagatcaaagaagagctggccgccagacgcaaagtgctgttggaaaacaacaaactgctggaagagcagcggctgacccagcgtacccagtttgatctggagatgatgaacgagctgggctactgtagcgggattgaaaactacagccgcttcctctccggtcgtggaccgggtgagccaccgccgacgctgtttgattacctgcctgccgatgggctgctggtcgtcgatgaatctcacgtcaccattccacaaattggcggcatgtatcgcggtgaccgggcgcgtaaagagacactggtggagtacggcttccgcctgccaagtgcgctggataaccgtccgcttaagtttgaagagttcgaagcattagcgccgcaaaccatctatgttagcgcgacgccgggtaattacgagctggaaaaatccggcggcgatgtggtggatcaggtggtgcgtccaaccggattgcttgacccgattatcgaagtgcggccggtggcgacacaggttgatgatcttcttagcgagattcgtcagcgagcggcaattaacgaacgcgtactggtcaccacactgaccaagcggatggcggaagatcttaccgaatatctcgaagaacatggcgagcgcgtgcgttatcttcacagtgatatcgacaccgtcgaacgtatggagattatccgcgacttgcgtctgggtgagttcgacgtgctggtagggatcaacttactgcgcgaaggtctggatatgccggaagtgagcctggtggcgatcctcgacgctgacaaagaaggcttcctgcgttccgaacgtagcttgatccagaccattggtcgtgcggcacgtaacgttaacggtaaagcgattctctacggcgataagatcaccccaagtatggcgaaagcgattggcgaaaccgaacgtcgccgtgagaaacagcagaagtacaacgaggaacacggaattacgccgcaaggcttgaacaagaaagtggtcgatatcctggcgctggggcagaacattgccaaaaccaaagcgaagggcagaggaaaaagccgcccgattgttgagccggataatgtgccgatggatatgagccctaaagcgttgcagcagaaaatccatgagctggaagggttgatgatgcaacacgcgcagaatctggagttcgaagaagcggcgcaaattcgtgaccagttgcatcagctgcgtgagctgtttatcgcggcaagctaacaggatagcgaagaagactgatgacaaacggaaaacagcctgatgcgctacgcttatcaggcctacattttctccgcaatatattgaatttgcgcggtttgtaggccggataaggcgttcacgccgcatccggcataaacaacgcgcactttgtcttcaataggaagccggaattttccttcggatttccgttaacctaaagcctgtaacgccttttccagcgcgttatgtaacaactggcggtcatgacgatacggaatatcgctggcctccagtacctcctggatcacaatccgctctttcaccgcgctgacatccacttttggcccgacgatgaccgcatcaatgacctttttaccaacatactgctccataattgccagcttgctttccagcttcaaattagccgcaggtaaactcaactcacgccccagattgccgatataaaccatcggcgctggcgtgcggcgtaatgcctgggcgatttccttcagcagcagaattggcatcaggctggtataaaaactgccaggcccaataatgatgagatccgcttcattgatagcgtgaaccgcctcacgcgttgcgggtacattaggcgttaacaataactcttgaatcggcgtagttaactggtcgatattgacctcgccgtaaacttcatgcccctgatcgtcaatcgccatcagatcaacaggatgctcactcattggaatcaaatgcgtatccactttcagcagattacgaattaaattgatggcttccagaggccgcacgctaaggtgatccagcgcctttaacatcaagtttccgagattatgaccggaaagttcgccattgccaccaaaacggtattcaaacatcgcggaggcgacgctcggttccgttatcagctggttgaggcagttgcgcatatcgccccaggcaatgccgccttcactacggcgaatacgccccgtgctgccaccattatcggtggtggtgacgatacccgttaaacgagaacccaaagagctaagactactgagaacgcgtcccagtccatgccctccgccgagagcaacgacacgatcaagatcagccagcgtacgattgcgcatatagtttcctggagtcagattatccgcgctacagtagcgcaaattgcggggaaacagcaattaacctgccaatattgaggatacaaactattttcttctacctctaaaggacgatgcacgctatgcctccctgatgatgtatatcaaagtaaaaccgccattttcccttattctgtagcgaaatagcacgatcatgacgctatatacatgattacatagcgaaagtgtggatggtaaaaatctcatttacacgctagtatcggcataaccactaaacactctagcctctgcacctgggtcaactgatacggtgctttggccgtgacaatgctcgtaaagattgccaccagggcgaaggaagaaatgacttcgcctcccgtatctggaaaggtgtacatggctagtcaactgactgatgcatttgcgcgtaagttttactacttgcgcctgagcattaccgatgtgtgtaactttcgttgcacctactgcctgccggatggctacaaaccgagcggcgtcaccaataaaggctttcttaccgtcgatgaaattcgccgggttacgcgcgccttcgccagactgggcaccgaaaaagtgcgcctgacaggaggagagccgtctttacgccgcgactttaccgatatcatcgccgctgtgcgggaaaacgacgctatccgccagattgcggtcacaaccaatggttaccgtctggaacgcgatgtggcgagctggcgcgatgcgggacttactggcattaacgtcagtgtcgacagtctggacgcccgccagtttcacgctattaccgggcaggataaattcaaccaggtcatggcagggattgatgctgcatttgaggccggttttgagaaggtcaaagtcaataccgtgctgatgcgtgatgttaatcatcaccagctcgacacctttctgaactggatccagcatcgccctatccagctgcgtttcatcgaactgatggaaacgggcgagggcagcgagctcttccgtaagcatcacatctctggtcaggttctgcgtgacgagctactgcgtcgcggctggatccaccaattacgtcaacgcagcgacggtcccgcgcaagtcttttgccatccagattacgccggagagattggccttatcatgccgtatgaaaaagacttctgcgccacttgcaaccgcctgcgcgtttcctccattggtaaactccatctctgcctgtttggtgaaggcggcgttaacctgcgcgatctgctggaagacgatacccagcaacaggcgctggaagcgcgtattagtgcggcgctgcgggagaagaaacagacccatttcctgcatcaaaacaacaccggtattacgcaaaacttaagctacattggcggctaaaacgtcaaaaggagagatcagatgagtcaggtaagcactgaatttatcccgacccgtattgctattcttacggtttctaatcgtcgcggtgaagaagacgatacctccggtcactatctgcgcgatagcgcgcaagaagcgggccatcacgttgtcgataaagccattgtgaaagaaaaccgctacgctattcgcgctcaggtatctgcgtggatcgccagcgacgatgtacaagtggtattgattacgggtggtactggcctgacggaaggtgatcaggctcccgaagcattgctgccgttgttcgaccgtgaagttgaaggttttggtgaagtgttccggatgttgagctttgaagagattggcacttccacgttgcaatctcgtgcggtagcgggcgtcgccaacaaaacgctgattttcgccatgccgggtagcaccaaagcgtgccgtaccgcatgggaaaatatcatcgcgccgcagctggatgcccgtacgcgtccgtgtaatttccatccacatttgaagaaataagtatgagccaactgacccatatcaacgccgctggcgaagcgcacatggtggatgtctccgccaaagcggaaaccgtgcgtgaagcgcgggcggaagcctttgtcaccatgcgcagcgagacgctggcgatgattattgatggtcgccaccacaaaggcgacgtatttgccactgcgcgtattgccggtattcaggcggcaaaacgcacctgggatctgatcccgctctgtcatccgctgatgctcagcaaagttgaagtcaatttacaggccgagccggagcacaatcgggtgcgtatagaaaccttatgccgcctgaccgggaaaaccggtgtcgaaatggaagcattaaccgcggcctccgtggcggcgctgaccatttatgacatgtgcaaagcggtgcaaaaagatatggtgattggtccggtacgtttgctggcgaagagcggcggcaagagcggtgactttaaggtggaagcggatgattaaagttctttttttcgcccaggtgcgcgagttggtgggaacagatgcaaccgaagtggctgcggatttcccaactgttgaagcgttacgccagcacatggctgcgcagagcgatcgctgggcgctggcgctggaagatggcaaattactggctgccgtcaaccagacgctggtgagttttgaccatccgctgactgacggcgacgaagtagctttcttcccgccggtaaccggaggttaagatggcagaaaccaaaattgttgttggtccgcagccgttcagcgtaggagaagagtacccgtggctggcggagcgtgacgaagacggtgcggtagtcacctttactggtaaggtgcgcaaccataacctgggcgacagcgtcaacgcattaaccctcgaacactatccggggatgactgaaaaagcactggcagaaattgttgatgaagcgcgtaaccgctggccgctggggcgcgtcactgtgattcaccgcatcggggaattatggccgggcgatgaaatcgtttttgtcggtgtcaccagtgcgcatcgcagcagtgcgtttgaagccgggcagtttattatggattatctcaaaacccgcgcaccgttctggaagcgcgaagccacgccggaaggcgaccgctgggttgaagctcgggagagcgatcagcaggcggcaaaacgctggtaattttttgttagccggataaggcaccgctgcgtccggcaatttcaccgctcagtacatacgtttacgctgcgtcgatgcacagcctcatcattttgcagtatccttaagatattccttatatcttcaggagatcgtcatggacagattcccacgttctgatagtatcgtacaaccccgggctggcttgcaaacttatatggctcaagtctatggctggatgaccgttggcttgttgctgaccgcatttgttgcctggtatgcggctaattccgcggccgtgatggagctgttgttcactaaccgtgtctttttaatcggtctgatcatcgcgcaattagcattggttattgtgttaagtgcgatgattcaaaagctgagcgcaggtgtaacgacgatgctctttatgctttatagcgcgctgacgggtcttacgctttccagtatattcattgtctataccgctgcttctatcgccagtactttcgtcgttactgccgggatgttcggcgcaatgagcctgtacggttacaccacgaagcgcgatttaagtggctttggcaatatgctgtttatggcgttaatcggcattgtgctggcaagcctggtcaacttctggttgaaaagcgaagcattgatgtgggcagttacctacatcggcgtgattgtctttgtcggattgacggcgtatgacacgcagaaactgaaaaatatgggtgagcagattgatacccgcgacacgagcaacctgcgcaaatattccattcttggcgcgttaaccttgtatctggacttcatcaacctgttcctgatgttgttgcggatcttcggcaaccgccgttaattctttttcaccatcactatcccggccatgtgtcgggatttttttcttactaaaaacgacacttaacaagtaccaggtataaaatatgccttatggacgagcggaagcgttttctgtatccataaatgcaaaagtattttgtatgcgtggttttaaatttattgatggtgaatattaatattttttctaaggataactaaaagaatggaaagttacagccaaaacagcaataaattagattttcagcacgaggccaggatattaaacggtatatggctcattaccgctttaggtttggtggcaaccgcaggactagcctggggagctaagtatatcgaaattacggcaaccaaatatgatagtccaccaatgtatgtcgccatagggttattattactttgtatgtatggcttaagtaaggatatcaacaagataaatgccgccatcgcgggcgtaatatatctgtttttactctctttggtggcgattgtcgttgcaagtttagttcctgtatatgccattatcatcgtgttcagcactgcgggcgcgatgtttttaatcagtatgctggccggtttattatttaatgttgatcctggttctcaccgttttatcattatgatgacgttgacagggttggccctggtaatcatcgtgaatgcggcattaatgagtgaacggcccatttggataataagttgcttaatgattgtgttatggagtggcattatcagccatggacgaaataagctccttgaattggcggggaaatgccatagtgaagagttgtggagtccggttcgttgcgcttttacaggtgcattaacactctattactattttatcggcttctttgggatacttgccgcgatagctataacgcttgtctggcaaaggcatacgcgtttttttcattaaccgtaaatgcacatactaaagaacttaactaaacttcacatcgccgcttcatttttcgcccgtagcttcttcgcctggctttccagcaacaggtaacagatcagcgccagcagcagtgggataaagtaatacagcacacggtaagcgagtagggcggcgataattgtacctttggaggtatgctccccagccagtagtgcgataaacaccgcttccagcacaccgatccccgccggaatatgcacgatgacgccagcaatactactaaccagtaacacgcccagtacaaagaaatagttcacgctttgaccaagtaacagccagataatcgcccccattaccatccagttaacgctggaaatcagcatctgagcgagggcgaatttccaactaggcagcaccagcttttgccctttgatggtcatatggcggtgcttcgcgaaagcgcaaaaccacaaataaaccgcgataatcatcagtaagccaatgccgagaatacgcagcgtagtttgatcgacataccagtgatccggcaactccaccacgcctgcggtaaagataatccctgccagtaaaatgtagcccagccagttggtggtaatactgaggctgaaaatccgcgtaatagtgctaccgggcaaccccagacgagagtacaaacgatagcgcataccaatgccgccgacccaggtactgagcgtcaggttgaaggcgtagcagataaagctcaccagcatcacctggcgcttcgccagtttgtgaccgcagtaaaagcgggcgagcaggtcatagcagccgtaaatcagatagctgacgaccaccagcccgaccgcactaagcagcgcaacgcgattgtagtcgcggatgaccttccagacctcttcccagtccacttttttggcgtagaccaccagcaacacaatcaccgcgataaaaaacagccaggtgaggatcttctttgctaagcgccagcgcgggtgacttttactcatcagggttttacccccgtgttttcagtttctacccgatcctgcgtttccattgtcggttgtgcgggcggatcaacctgcgccagacgtggcgtgtgtgccggaagccagccaaccagcgccgggaagtggcgtaaaaagtggaacgccagcacgcttttggtcaggttccaccaggtgcgtttgggcagcatggtttcatccacctgctgacaatctgcggcaataatgccgttcagattatcgcgcagcgtctggttaaaatgacgatcgtggatgatgacatttgcttcgagattcagactcaaactgagcggatcgagattactggaccctactgtcgcccagtgatcgtccatcaatgccactttgccgtggagcgggcggcggcggtactcaaaaacctgaacgccgcctttaaccagatagttatacagcaagcgcgcaccgactctgacaatcggcatatccggttcgccctgaatgatcagtttgatccgcaccccgcgccgtgccgctttacgcaaggcgtgtaaaaatcgatagccggggaagaagtaggcgttggcgataatcacttcccgccgcgcctgagtgagcattttcaaataatggcgttcaatatcatcgcgatgttcttcgttatcgcgccagaccagcaatacctgcgcttctcccggctggcggttctcttccgctttgtgatgacgtcgccaccagcgtcgtgccgcgctctgtccaggcaggttttccagctcaaactggagaatatcttcgacaatcggcccttcaaggcgtaccgcgtaatcctgtttagcctctggaccgtagctggacatatgctcggcggagtaattcagcccgccaataaaggctatacgcgcgtcgatcaccacaattttgcgatgcatccggcgaaacacattggtgcgcataccaaaaaggcgagggcggggatcgtagtagcggaacactacgccagctgccgtcagttcattgacaaactcatcgctgagatccgggctaccgtagccatccagcaagacttccgctttaaccccgcgttgcgctgctgccagtagtgccgcatgcagttgtttgccgacgtcatcctcaaaccagataaacgtttcaagaatgatgcgttcttgtgcctcgccaatcgccttaaacaccgcgggataatattgctcgccgttttccagcaactggatcttattgccttcgcgccagctacatttcataaatgaatctccgcacttaaaggggcatgatcagaaaggtgtcgccatgtccgcagcggcaacgcggttggcgcgctggcgctggcatttttgacgtagatcctgtccagtcgtagtagaggaaattgcaccggaaacgtgcgcgccgggcgtccgtgggcgcgggtaaaaatctcatccagtccggcctgcacttttaacggatgattagctttttgccgccagtcattgaaatcacccgccaccaataccggttcgccgtccggtagctcattcacccattcggcgagcatcgcaagctgcgcctgacggtgcgcctcacgcaggcccagatgtacgcacatcacatgaatcgcttttccggtcatcggcggcacaatgcggcagtagagcacgccgcgcttttccgcaccatcgacgctaacatcgcgattctcataatgttcaatgggataacggctcagtacggcgttgccgtgatgcccttccgggtatacggcattgcgaccgtaggcaaaatcgctccacatagtgtcggcgagaaactcgtagtggctggtatcgggccagttttccacatgcagcggatgaacttcgtgcgcgcccatcacttcctgcaggcaaacaatatcggcgctgacggtacgcacggcgtcgcgaagttccggcaaaatgaagcgtcggttaaacgcggtaaagcctttgtgaatattgatggtgagcaccttgaagctaaattgttgtgtttgatcgggcataattttcctgtctttgcctcttatctcattgaaatagtgtagtcggcgtcacaaaaaggtgcggtcttacggaattttccgtaaagttcggtactctgagtaagtagagataaattcttcaggagagaagccatgaagtggcaacaacgtgttcgtgtcgcaacgggtctaagttgctggcagattatgttgcatttactggtagtggcgctgctggtggtgggctggatgagtaagactctggttcacgtcggcgtgggattatgcgcactgtattgtgtcacggtagtgatgatgctggtgtttcagcgccaccccgagcaacgctggcgtgaggtggcagacgtgctggaagagctgaccacgacctggtattttggcgcagcgctgattgtgctgtggctgttgtcccgcgttctggaaaacaactttttgctggcaattgcagggctggcaatccttgccggcccggcggtagtgtctttgctggcgaaagataagaagttacatcaccttacgtctaaacatcgcgtacgccgctgattacatcaccttacgtctaaacatcgcgtacgccgcactccctgtcgtggccgttatcaccagtagcggccacaaactattccacacaatatccagactcgcatccttcaaataaatctgcttggtaatgtccgtaaagtggcgaatagggttaatccacgtcaggttttgcagccataccggcatgttttccaccggagaaacgtaaccggaaaggagaatggcgggcatcataaagacaaacacgccgataaacgcctgctgttgtgtactacagagactactaatcaacagaccgaatcccaccaggcttaaaccataaatcaccatcgtaaagtagaacagcgccaggcttccggcgaaggggatttgatacgcccagataccaatcgccagcacaatggtggcctggaaggtggcgacaattaacgccggtacggctttgccgatgaagatctgccaggtggtgagcgggctaaccagtagctgatcgagcgtaccttgttcacgttcgcgggcgacggaaagactagtgacgatcattacgccgatagtggtgatcatggcgatcagactcggcaccacaaaccatttgtagtcgagattcgggttataccagttgcgtaccaccagctcgctgttgttaggtttcggttttccttccagcagctcctgctgataatttttgacgatctgttgcaggtagttggcggcaatttgcgcactgttggagttacgcccgtcgaggatcaactgcaaaggcgcggtctggaaggtatccagtttgcggctgaagtcagccgggaaacgcaccagtagtaacgccttttgtgtgtcgatggttgggcggatctcctgtgggcttttcagcagcagcacatgagtaaaggcgctggcgcgggcaaaacgttgggtcagctccacgctatgctcgccgttatcttcatcgtagatggcgatggtggcgttagtcacttccagcgtggcggcgaacgggaacaggatcacctgaattagcacgggtaaaatcagaatcgcgcgggtttgcggttcgcgcagcaagctctgcaactctttgcggattaacgtccataagcgatgaaacatgctcttctccttaatccagccgacgtttggttttcagccacgtcaggccgataaacatcaccgcgctagcgatcaaaaacagcacgtttaccaccagcaccactggaatattcccggcgaggaacaggctttgcagggtgctgacgaaataacgagcgggaataatgtacgtcaccgcgcggatcaccgcgggcatactgtcgatctgaaaaataaagccggaaagcataatgctcggcagaaaagcggcgttcagggcgacctgagcggcattgaactggttgcgggtaatcgtggaaatcagcagccccatccccagggtactgagtaaaaacaggctggagataaaaaacagaatcagcaggctcccgcgatacggcacgccgagaataaacacactcaccagcatacacagcaacatcgccagcatcccgagaaagtaataagggatcagcttacacagcagcagttccgtgcgggtaatctccgtagagagcagagcctccatggtgccgcgttcccattctcgcgccaccaccaggctggtgagaatcgcgccgatgaccgtcatgataatggtcaccgcaccggggataatgaagtgctggctaatcgccgccgggttaaaccagtagcgggtttgtacatcaataagcggttcaaaagtctgcccgttgtcctccgctcgctgcatttgccagatctgccagatcccttcgacatacccctgtacaaagttagcggtattcggctcactgccgtcggtgatcacctgaatcggtgcggtggcgttggcgcgctccatctgttccgcaaaatccaccggaataaccaccagaccgcgaattttccccgcctgcattttggcgatcagttcctgacggttatcgctgatggtggcgtcgatgtaggggctaccggtcatggtgtgggtgaaatccagcgccgcttcgctacgctgttccagtaaaatcccgacccgcagcttgctggagtcgaggttaatgccgtaaccaaaaataaacagcagtagcagcgggatcactaccgcaatcagccagctactcggatcgcgaacgatctgccgcgtctctttaacgcacagcgcccgtacgcgacgccaggacaggatcgggttactcattgctatgctccttatcccagtcgtggatcaactgaataaaggcttgctccatggtgggatcgggttgctcatcgttagcgctctgtgctttcaaatcgtccggcgtgccgctggcgattaatttcccgcggtacaccaggccgatgcggtcgcaatattccgcttcatccataaagtgggtggtgaccatcaccgtgacgcctttctctaccatgctgttgatgtgcagccaaaattcacggcgggtgagggggtcaacgccggaagtcggttcgtcgagaaacagaatgtccggttcatgcatcaggctacaggccagcgccagccgctgtttaaaacctaatggcagttcatcggtggcgtgggaggcgatacttttcaggccgaacgcctcgctcatgcgggagattttttcgttctgcgcccgaccgcgtaagccatacacaccagagaaaaagcgtaaattctgttcgaccgtcaggttaccgtagaggctaaatttttgcgccatatagccgagatgctggcgcgctttaccggaactctctttcagatccatccccagcaccagcgcctggccggaagtcggcaccagcaaaccgcacatcatcttaaaggtggtgcttttacccgcgccgtttggccccagcaaaccaaaaatctccccacgtttaacggcaaagttgacgtgatcggtggcggcaaaatccccaaatttcttggtcagttctttcgcttcgatcaccgtctcgccgggtgtgccttctaccgtatgtaatattgcgcccagcgggctttcgctggttccggcaccgcccagcaaatcaataaacgcatcttcaaaacgcggcgtagtttcgttgatgttgatttccggcatcccgtcggcatggcgaatatcgtctggtgtggcctcttttttgaggatcagacgtacgcttttcccctgaatcatgccgtcgctgacctgcggcagtttcaaggcgcgttgcaacagtttgcggttgccctcgtgtggactggtcatcagaaagctgcgtccggccatggtttgtgtcagggcttttggttctccctgatacagcaactcgccttcgttcatcagtaacacgtcacggcactgctcggcttcgtcgagatagctggtactccagaggattaacatcccttcgcccgccagctcatgcaccatctgccacagttcgcgccgactgatagggtcaacgccgacgccgggttcatcgagcagcaacactttcggttcgcccaccagggtacaggccagaccgagtttttgtttcatcccaccggagagcttgcccgccaggcgtccggtaaacggcccaagagacgtaaactccagcaggcgagcaaaagtttgcttacgtgcctcgccggtgacgctgcgcaaatccgcgtacagattgaggttctccatcaccgtgagatcttcatacagaccaaatttctgcggcatataaccgagcacggcgtgcagcgcgccgtcgtttttgatcggatcaaagccaatcaccgtggcactgccgctgtcgggtttcagtaatcccgccaacatccgcatcagcgtggttttacctgcaccgtccggccccaccaaccccgtcacataaccggcgtgaatggtacaatcgagcggcgcgacggcgggcttgtccatgcccggaaagcgtttttccaggccgttcagcgtgataacggcatcattcatgtcctgcctcgtcaccgaattgtaccgtcactggcattccctggcgtaacgcatcatcggcgtcggtcaccacaatacgcaggcgatagacgaggtcggtacgcagatccggcgtttcgacggttttcggggtaaattcagcagtcgggctaacgaaaccaatctgcccgtgatacggcttgtccgggcgaccatcggtataaagcagcactttgcgccccggctgggcctggtcaagattacgttcatcaacataagcgcgcacccacaccggacgcgttagactaacggtaaacaccgtgccaccttcattgaggaccgtgcctggctccaccgcgcgcgttaacagcgtgccatcagacggggctatcaacgtactgtcctgtaaattcaactccgcctgcgccagttgcgcctgcgcctgttcgaggctggctttcgcctgagcgatgtcctgttcacggttaccggaacggtactgacgcaatttatcctgtgcacttttcagcgttgcctgcgcctggtcgcggctggagcgggcattttccaggtcatttgcgctaatagtgcggcttttccacaacccttgctggcggttatagaagttctgcgcatagtcataggcggcttgcgcctgtttcaccgctgcggcggcctgagcgatttcttcattgcgatacccggcaagcatcaggtcatactgcgcctgtgccacgctaacacccgctttcgcctgcatcagggcaatctcatacggcttgtgatccagttcgcccagcacctggcccgctttgatagcatcaccttcgtccaccgccaggctttcaacgcgccccccaacacggaaactaagatttaccgtacgaatatccacgttgccatacagcgtcaggccgttatcctggcggctttgataccaccagtagcctccggcaaccacggcggcaagtaccactaccgccaatccgatcacgacaggttttttcatcactacaaactcctttgcgataattacaaactcctttggcttaatccttgcaaaatcaggtcgatatgacaggtcaccgtctggttgatcagttcggtcttttcttcatcgaacgcggtccagccggtacgtaacagaattgtttctttgccaagacggaacgccagaatctcaccaatcaacgcatgggtatgaaggatcatgcgggtgtcattggcgtcgcagccggtccaggcggcaatcaggcgtgtcaggtggctgtgtagcggactaatcacctgttcgtgcaccaggtggtaggctgccgtgggagagagctgctcacgggagataaacttgctgaggttgacggtgtcatcctgggtgagcagcttaatcatgttcctgcaggcgcgaaggatcagttcacggatggcagcccgatcaggctgtggttgcgcgaacaagcgttcggcttcctcggcatgcggacggaactgctcgccaataaaatcggcaatccactgggcgcaggcgaggtacaaatcttctttgctaccgaagtagtaggtgatggcagcgatattctgcccggcctgggcggctatctcgcgagtggtggcgttcattccatattcaccaaactgcgccagtgcggcagcaatcagctgttttttcgcctgttcacccttgattgtcatggcaggattattcatcgcacagtccattcttaatcaaatgattgattaagattatgactccataggggagttgtccagtatggctaagaattttagcaacgccagtcacagggataatttatgcgctgcgtcacaaaaactgctacactccgctccctcatgacattgtggtttttgtcattttccttttcagtatctccctgaaaactacaccggtaacggtcggggcggttcggagtagttatgtctttcgattctttgggtttaagccctgatatcctgcgcgccgttgccgagcagggttaccgtgaacccacccctattcagcagcaggcgatccctgcggtgctggaaggccgcgacctgatggctagcgcccagaccggcaccggcaaaacagcgggctttacgctgccgctgttgcaacacctgatcactcgccagccgcacgccaaagggcgtcgtccggtacgtgcgctcattcttaccccgacccgtgaactggcggcgcagattggcgaaaacgtccgtgattacagcaaatacctgaacattcgtagcctggtggtgtttggtggtgtgagtattaacccgcagatgatgaaactgcgtggcggcgttgatgtgctggtggcaaccccgggacgtttgctggacctggaacatcagaatgcagtgaagctggatcaggttgaaatcctcgtcctcgatgaagctgaccgcatgctcgacatgggctttatccacgatatccgtcgcgtgttaacaaaactacctgcgaagcgccagaacctgttattctccgcgaccttctctgacgatattaaagccctggcggaaaaactgttgcacaacccgctggaaatcgaagtggcacgccgcaataccgcgtctgatcaggtgacccagcacgttcactttgtcgataagaaacgcaaacgcgaattgctgagccacatgattgggaaagggaactggcagcaggtgctggtgtttacccgtaccaaacacggcgctaaccatctggctgaacagctcaataaagatggcatccgtagtgcggcgatccacggcaataaaagccaaggtgcgcgtactcgtgcgctggctgattttaaaagcggcgatattcgtgtactggtggcaactgacatcgctgcgcgcggcctggatattgaagagctgccgcacgtcgtcaactatgaactgccaaacgtacctgaagattatgtccaccgtatcgggcgtaccggtcgtgcggctgctaccggtgaagcgttgagcctggtgtgtgttgatgaacacaaactgctgcgtgatatcgaaaaactgctgaaaaaagagatcccgcgcattgcgattccgggctatgagccggacccgagtatcaaagccgaaccgatccagaacggtcgccagcaacgtggcggcggcggtcgtgggcaaggtggtggtcgcggtcaacagcaaccacgccgtggggaaggtggcgcaaaatctgcaagcgcgaaacctgcagaaaaaccgtctcgccgcctcggcgatgccaaaccggcaggcgaacaacaacgtcgccgccgtccgcgtaaacctgccgctgcgcagtaatcttttatgccgggctatgcccggcatcaggctgatgaacaaacgcaaaactgcctgatgcgctacgcttatcaggcctacgtgaactctgcaatatattgaatttgcatgcttttgtaggccggataaggcgtttacgccgcatccggcatttcacaacaagcacttgtcagcaatttgagaacacgggaaaaaatttatctgttttaccgcccataagccaccgagacgttacttctctatagccaattgttcgcgcaactccattaaaaggtagcccagtcgattcttgcccttaccatgaccaccgtctccccagtaagcatcgttttccgtatgctcaaccagttttgcgggcgcggttgccagcaagagcgcacgcagttctgcatgctgttcgaatttagcgcgaagtgcttttcgcatcacctgttctttgacgctctcccagtttttacgcagaggcttagaacgatcgcgccccatgcgtgcggcgaccataggggaagaaacccgacggatctcttcgcggtatttttcatcaaggaatttttgtgcctgaaaatagtgttcactggtaggccaggttttcccgtcaaccttgatgggccaggcggcaaagttagaaaaatcaccgtagtcatcgctggtgctgtagaaatttatgatggtgtcttgcatgacgtgttggatcctttgtgctcgaacgggcattaaaccgcattatgttggtggttattgcgagccgctttccagaaacagaaaaaccattacccctgaaaaccgaaaaatgccacaatattggctgtttatacagtatttcaggttttctcatggcattaaccgccgcgcttaaagcgcaaattgccgcctggtataaggcgcttcaggaacagatccccgactttattccccgtgcgccgcagcggcagatgattgcggacgtcgccaaaacgctggccggagaagaagggcgacatctggcgattgaagcccccaccggcgttgggaaaacgctctcttatttgattcccggcatcgccattgcccgcgaagagcaaaaaacgctggtggtgagtaccgccaacgtggcattgcaggatcagatttacagcaaagatttaccgctgctgaaaaagatcattcccgatcttaaattcactgccgcttttgggcgtgggcgctacgtttgtccgcgtaatctgacggcgctcgccagtactgaacccacgcaacaggatctgctggcgtttcttgacgacgaactgacgccgaacaatcaggaagagcaaaaacgttgtgcgaagctgaagggcgatctcgatacttataaatgggatggtctgcgcgatcatactgatatcgctatagatgacgatctctggcgtcgtttaagtaccgacaaagccagctgcctcaaccgcaattgttactactatcgtgaatgcccgttttttgtcgctcgtcgggagattcaggaagcggaagtggtggtggcaaaccatgcgctggtgatggcggcgatggaaagcgaagcggtattgcctgacccgaaaaatttactgctggtgctggacgaaggccatcacctgccggatgtggcgcgggatgcgcttgagatgagcgccgaaatcaccgcgccgtggtatcggctacagctggacttgttcacgaaactggtcgctacctgcatggagcagtttcgcccgaagaccatcccaccgctggcgatccctgaacgtttgaatgcgcattgtgaagagttgtatgagcttatcgccagcttaaacaacattctcaatctctacatgcctgccgggcaggaggcagagcaccgttttgcgatgggcgaactgccagatgaagtgctggagatctgccagcggctggcaaaactcaccgagatgctgcgtggcctggcggagttatttcttaacgatttaagtgagaaaaccggcagccatgacattgtacgtctgcatcggttgattttgcagatgaaccgcgcgttggggatgttcgaggcgcaaagcaaactctggcggctggctagcctggcgcaatcttccggtgcaccggtgaccaaatgggcgacgcgggaagagcgcgaagggcagctacacctctggtttcactgcgtgggaatacgtgtcagcgatcagctggaaaggctgctgtggcgcagtattccgcacattattgtcacctccgcaaccttgcgtagcctgaacagttttagccgtttgcaggagatgagtggtctgaaagagaaagcgggcgaccgttttgtggcgctggattccccctttaaccactgcgaacagggcaaaattgttattccccggatgcgcgttgagccttccatcgacaacgaagagcagcatattgccgaaatggcggcctttttccgtaagcaggtggagagcaaaaaacatctcggtatgttggtactgtttgccagcggacgggcgatgcagcgctttctcgactatgtgacggatttacgtctgatgttgctggttcagggcgatcagccgcgttaccgtttagttgaactgcaccgcaaacgcgtcgccaacggtgagcgcagcgtgctggtgggcttacagagttttgccgaagggcttgatttgaaaggtgatctgctcagccaggtgcatatccacaaaatcgcttttccgcccatcgacagcccggtggtgatcaccgaaggggaatggctgaaaagcctcaaccgctatccgtttgaggtgcaaagcctgccgagcgccagctttaacctgattcagcaggttgggcgactgattcgaagccacggttgctggggcgaagtggttatctacgacaaacgcttgctgaccaaaaattatggcaagcgactactggatgcattaccggtatttccgatagagcaaccggaagtccctgaaggtatagttaaaaagaaagaaaaaacgaaatccccacgccgtcggcggcgttaatgatgtgagtcaggtaaggagtcgtaaatggactatcgcaaaatcattaaagagatcgggcgcgggaaaaaccacgcgcgcgatttagaccgggatactgcgcgcggtctgtatgctcatatgctcaatggtgaagtccctgaccttgagttgggcggcgtattgattgcgctgcgtatcaaaggagaaggggaagcagagatgctcggcttttacgaagccatgcaaaatcacaccatcaagctgacgccgccagcaggcaagccgatgccgattgtcatccccagttacaacggcgcgcgtaaacaggccaacctgacgccgttgttggcgattctcctgcacaaactcggttttcctgtggtggttcacggggttagcgaagatccaacccgcgtgctgactgaaaccatttttgaattgatgggtattacgccaacgttgcacggcgggcaggcgcaggcgaagctcgacgaacatcaaccggtgtttatgccagtcggcgcgttttgcccgccgctggaaaaacaactggcgatgcgctggcggatgggcgtgcgtaacagtgcacataccctggcgaaactggcgacgccatttgccgaaggtgaggcgctgcgtctttccagcgttagccatccggaatacattggacgcgtcgcgaagttctttagcgatatcggcgggcgggcgctactaatgcatggtactgaaggtgaagtgtatgctaatccgcagcgctgcccgcagatcaatctcattgaccgtgaagggatgcgggtgctgtatgaaaaacaggacactgctggtagcgagttactgccacaagcaaaagatccggaaaccacggcgcagtggattgagcgttgccttgctggcagcgaaccgattcccgaaagcctgaaaatccagatggcttgctgcctggtggctacgggtgaagcggcaactatcagcgacggcctggcgcgcgttaatcaggcattttaattcttttctcagccggatgagccatgtcatccggcttttaccccaccgcaatatgaaattcctgcatctttattgaccttcccacgcccggcgtgcagcataaaaatacaacaaacacataacataaacaggagttaaccatggaaagtggtcatcgctttgatgctcagacgctgcacagttttattcaggctgtatttcgtcagatgggtagcgaggaacaagaagcgaaattagttgccgatcatttaatcgcggcaaacctggcagggcatgatagtcatggtattggcatgatcccaagctatgtacgctcctggagtcaggggcacctgcaaattaaccatcatgccaaaaccgttaaagaggcgggggcggcggtcacgctcgatggcgatcgcgcatttggtcaggtcgcggcacatgaagcgatggcgctggggattgagaaagcgcatcagcacggtattgccgccgtggcgctacataacagccatcatatcggccgtatcggttactgggcggagcagtgtgcagcggcggggtttgtctctatccactttgttagcgtggtcggtattccaatggtcgcgccgttccacggtcgcgacagccgctttggcaccaatccgttctgtgtggttttccctcgtaaagataatttcccgctgttgcttgattacgccaccagcgccattgcatttggcaaaacccgcgtcgcctggcataaaggcgtccccgtgccgccaggttgcctgattgacgttaacggcgtgccgacgaccaatccggcggtaatgcaggagagcccgttgggtagcctgttgacctttgccgaacataaaggctacgcccttgcagcgatgtgtgaaattcttggcggggcgctttccggcggtaaaacgacgcatcaggaaacgttacaaaccagtcccgatgccattcttaactgcatgaccactatcatcatcaacccggaactcttcggcgcgccggattgtaacgcgcagaccgaagcctttgccgagtgggtgaaagccagcccgcatgatgatgataagccgattttgctaccgggcgagtgggaagtgaacacgcgtcgcgaacggcagaagcaggggattccactggatgcgggaagctggcaggccatttgtgatgcagcgcggcagattggtatgccggaagagacgttgcaggctttctgtcagcagttagccagctaaaaaaaaagcccgtccagtggcggacgggcaaacaagggtaacataggatcaatgagggttagagcatatgcgtctgtcggcaaacagacagggaaatacttgtgctggacgtagcgtaaacgcctgatccgtccaacggttcggattttgtaggcctgataagacgcggtagcgtcgcatcaggcatctgttgccggatgcggcgtaaacgccttatccgtcctacgaattacttataaattaccgcagtaccgcttaatttattgttgttggtggcggaagtgatgctgtatccactggcaccggctgccgcggctttctcagccagtttcgcttccagggcatcgagggtggatgcgccatcggcagaaaccacgccgattttattcatgttctgtgcctgggatgccgttaccggttccgccgcgaacacgccaaaactcagagtactaagagccatagcagcaacaacagtattgatagttttcataattaatctctcgcaggtgatttttgtataagtgacgttgtttcgtcgatgtgatgagtatcacgtttttttacgagagataaaatcgaagagaattgaccgccttgttcaaataaattgattgatatctaacctactgataaaccatttatttgttgtacttatgaacttgttttataccgcgtggcagtcacagcagcgttaaaggcacggaatgacacgcaaaatacaaattatactcgctatgcatctcgccagttgtagttaacgtaactggctgtctttgctacctctgcgattatatcctgtataagctggtttttgtaaatctttctcctgctgacaatgaatacataagcgcacgccaggaatggcttcccgacgggcctgcgggatgggggcaccgcactcttcacattcatccaggctttcgccgcgcggaatttcaccccgagcgcgggcaatcgcatcttcaattgtactgttgatctgttcgttgacggcgtcatcgttagcccaaccggatgccatatcgacctccccatatcaatacttgtacagttaagtgtagctaatccagggacgaactcgggcagttcaagcatcagatctcgctccattcccgcagcagattatgataaagattaagcaggctcaggatctcttcactttcgccgtagcggcttttcaggctctgaatattgttgtccagttcaaacagcatggcgcgctttttatcatcgcggatcatgctctggatccacataaaacttgccactcgtacgccgcgggttacgggtgtcacgcaatgcaggctgctggagggatacaacacgagatcgcctgccgggagttttacccgatgttgtccgaaggtgtcattaacgaccagttcgccgccgtcgtagctttgtggatcgcttaaaaacagcgtggcagaaaggtcagtacgcatccagccgttttgtggatggctgcgtactgcgccatccacatggaaaccataggtttcattgttctgatagcgattaaacagcggcgtggaaagggtacgcggcaaggccgcggcaaagaataaagcatgttggttaaccgcgttcagcacctcattttgcagggcggcgtataacgtgctgcgggtgtcgacctgttgattgttcttaacttgcgcaccttgtgcgccggtggtgacgcgtccatccacccattcggcttgttccagttgttcgcgaaaacgagcgacgtcctgtgggcttaacacgccgggaatgtggtacatcatacaatttctccaaaaagtggggcctgcgccccacatctgaatcagaaatgcatattggctgtgagcaagaaggttcttggctcgcccgggtgataacggtagccgctcttgttgatactggcgacgtaatcggtatcaaacaggttgtaaacgtttagctggaagtcgagattgcgattaactcgataccccagtttggcatcggcgacccagtaaccttcggtaaacgctggcgttcccaccgcgccgtcactacctttatgcatactgccgatatagcgtgcgcccgcgccaacagagatatcgtcggttgcctgatattggctccataaggtgaaggcgtgctccggggtatacggcaggctactggaaccatcctgggcaacatctttgccgtttttgatggttgctttttgctgggtatagccgccaatcacctgccacgcgggagtgatattcccggccacggatatctcatagccttcgacgcgtttcttaccgtattggctgtaagttccgtcatcattttgctcaacttcattttcgatatcagtgcggaacagcgcggcggtgagcaacagacgtttatccagaacctgccatttggtgccaatctcgctggtgttggctttttgcggtttaaaatcggtgcggttggcactgttaccgctgccagactgcgcaagggcgaagttgttgccgcccggaggctgctgggaaacggcatagttaatatagacattgccgttttccgtcaggtgatacagcgccccggctttccagttcatcagattgccgctcttggcggtgtcgacggtggtgaccggagaaccttttgccacaccagttgggcaggtgatggcaccgcgtccgctgccgccgcaggcggtggcactgtcatattcagtatgataattatccagacggatcccgccgttcagctcaaaatcacgggtgatttgcagcgtatcaaaggcgtaaattgcgaaggtatccgtctgaccattggcgtttgcgccgttgcgcgtcaggccgccgggatgaatgctgctgtcaggatgataaatatttaccgcgggtaacgtcaccggattaacgccgtagttagtctgcgtttcacgggtaaattccacgccggtactgacatcatgaccgatagaaccggtatagaacgtgctggtcaggttggtctggttggtgagaattttattactcacatctttggtattcgccgtgcgactccaggtccagctattcacatcgctggtgggctgagtaatattgctcgccccgcccataatcgccgtcatcaggtaatcctgctttacgcggctccaacgggtagtattgcgaatggtggtgttatcgttgatgtcgtgctcaaaacgcatggtggcggtgtcggtggtgctatcgtcgtaatcggaatccgtgccgtaaaagttatgagtatcaacttttccggaatgattcagggccgccgttcccgcagatggggcagaatagcccggcaaaccgatggtcggaatgccgccgtctggcgtgttgtgctgggtgacatgcagataattaagatacaaacgattcgctgtaccaaggccaaaagcgacagaaggggcgacgccgtaacgctcatttttgactttgtcgcgtccggcatcgtgcgttttttcgcccattacattcaggcgcaccgcggtggtatcaccaatgacctgattgacgtccagcgtgccgcggcggaaccaggcgctgccaatactggcggaggcgtcaatgccggaatcattgcgcggctgcttgctgatcatattgatgctgcctgtcggtgcgctgcgcccgtagtcggtgccggacggccctttaatcacttcgacctgctcggtattgaaggtgtcgcggctgacgctgccgatatcgcgaatgccatcaatataaatactgttagaggtatcggcaccacgcatataaatggcgtcgccagtggtggagttaccgttctcacccgcaaaaaacgcacccacgccggggacgtttttgagcgcgtcggtaaggttggttgcgccctgatctttaatcacttgttcagaaattaccgtcatcgtgcgggtagtatccgctaccggacggctgaatttcggatcggcagattgttgtggcgcataaaggctaggcgtacttgcttcgacaaccagcgtgtcatccgcgttagtttgcccttcggcggcgagtgcctgagccacaggcgtgatgccaatacaaagaccggcaaagaacgtgaggctatgaaattgtctggcagggaaattgcgattgttttccattttgcaggtgactttttcttatatgttgaaattttcactgccacgagaaagcctctctgcggatgcgatgccactgttaatcccgtgatagtgctcgtgaaagtgataataattttgataagcattatcacttggagcgattttctatcacccattgcgcgaaaaagaaatacatttatttacattgagttcatatttgatgttttttgattacaaaacagacgaaaactgcatccagaggcgaatgcagttacgttggtggggttatttgtagatggttgcagtaccgaacatctggtcatttccgcctgcggaattaatgacataacctttcgcgccttgttcgcgcgctttttctgccagtttatcctccagatcgcttaggttacttgcgccagttgcgctaacggtaccggcgggccgtagctgaccgctgtccaggttactcatcggttgcgcggcataagccgtgagagagattccgctcaggacggtggcaatcagtagtgtgaggcactttttcataatgacatcctcataaatacaacgggtagtgcctgataagtgtaggtcgcctgcgcgatgcaaatgacgcaaaaaattgacagagatgtgcttattttttgaacgatatatttttacaaaataagacaaatcaatgacatgcataatgctgatttttatgatgaattgccataaaccatagccatgttaaggttttggggaatgataaacgcagccagatatttaccctgtcgcgttatgcgggtatcttacgccgctgcttaaaggagaatgctatgtccgcccagaaaccggggttgcatccgcgcaaccgtcatcacagccgctacgatctcgccacgctttgtcaggtcaatcctgaactcaggcaattcctcacgcttacacccgccggggagcaaagcgtagactttgccaatccgctggcggtgaaggcgctcaataaggcgttgctggcccatttttacgccgtagcgaactgggatatccccgacggttttctctgcccaccagtaccgggccgggcggattatattcatcaccttgccgatttactggcagaagcaagcggaacaattccagcgaatgccagcattctggatatcggcgttggtgcgaactgtatttatccgctgattggcgtacatgaatatggctggcgttttaccggtagtgaaaccagcagccaggcgttaagcagtgcgcaggcgattatcagttctaatccggggcttaaccgcgccattcgtctgcgtcggcaaaaagagagtggggcgatttttaacggcatcatccataaaaacgagcaatacgacgcgaccttgtgtaacccgccattccacgattccgccgctgcggcacgggcaggtagtgagcgtaaacgccgtaacctggggctgaacaaagacgatgcactgaactttggcggccagcaacaggagttgtggtgtgaaggcggtgaagtcacctttatcaaaaagatgattgaagagagcaaaggcttcgcgaagcaggtgatgtggtttacaagtctggtatctcgtggtgaaaacttaccgccgttgtatcgtgccctgacggacgtgggcgcggtgaaggtggttaaaaaagagatggcccaggggcaaaagcagagtcgctttattgcctggacctttatgaacgacgagcagcgccgccgttttgtcaatcgccagcgttaaagcgttggttcccccggcggtaacggttcagccggggtcgcgcccggagcaggcagcacctgataagtctgcactggcgcgcgaacgcccgccaggtcgaaatgttttttcacctggctgtcgagggcaaagcgtaccgtccactgtttgagtggcagcgtggtgaagctaacacgcagtgtaaacgcggtattgcttaagccgacaatcccggcaaaattcggttcaccaataatcagcccgcgaatttcttcgttttccattaattccgctaccgcatctttcagtgcctgattggctttatcagcatcttcatggcgatcaacatcataatttgccaccacgctaccaatgccgcggacaaagttagcaaaggtggttatgctagaccacggaatgatgtgatacgccccggtatcctgtcgtacgcccacggagcgaatgctcatccgttccactgtgccggtcaacggcccgatagtcaccaaatctccagtgttcatgccgttttcaaactgaataaataccccggtgataatatctttcaccagcgtttggctaccaaagctgatagccagacctaatgccccggcacctgccagcaatggcgcgatattgacgccgatttcgctcaacacaatcatgatggtgatggtactgataatcaccgccagcgcgttacgaaacagcgtaagcagggtacgcgtgcgggcgctgggtagcgggcggccatgaatatcgctagccagccggttttcgatcaaactggcgagcaccgtccagccaaccgcgctgaagaaaagaatgagtgcgatacggatcaggatatctacggttttctgccccgcgccgttttgcagccagttccagaaatcgaacaatccccatgcgctcaacagcaacattaccgccacgcagactgtcagaatacgcgccgttttcagcgccgcgctcagccagccattcaaccgtttttgcagctccggatagttacgctgagtatgtgggctgagagtgatggttttcgccagccagcgggaaaacataccggaaacaaacgctgcgataccaataatcgccaggctgcgcaccgttgcacccatcataaatttcaggctgttgcccggatcgaacaagctaaagaaaaacagcacgataaaataggcgcttgccagccagtgccacaccagcgcaaaggcgcggataaacaggctgaaaaaggccaggctatgctccgcgaagttgagcaaatgctgggtaatctcttttttattacgaaagatcaggtacaacgcccagacggtcatgcacagcataatgatgacgttcgccagcgcacctatctgtacattcacctgattagagataatcggcacggccacaatcaggccataacctatcaaactgcttaaccagctcaggcgacgactccagtaacgggcgctctcgtcctgaatcgtgaacgggcgcagctccgccacgtttgggcaaaaaatcaggcgtagtacggctttgaaaaattcaatgagggcaaaggcgttgagaaacaaactttgttggaaagcgatggtgcgactgcctgcattcaggttgtcgcttaatacctggccgacaaataatgtcagggccagtaacagcaggtcgataataaacgccccgataatcatcgccggaagctgcaaccagttactgcgctcacgatttttttgccgcgcccactgacccattttgcgatacagcggcagtgcgcacaggcgaatcagccagtaaaaaccaaacactaataccgctaacatactaaaatgggtcagcgcattgctgaaggtttgtggattaaacggcttatgcggggagccggtgatattgcgataaagttgcccgaagcgggcggaaagggcttcaccataatggcggctgacttcggtgaccttttgcagcacggtttgctcttcgaccagcgtcggcggcactatttttggtaccggttcagcagggggcgtagcggcaacggtgcgcaactggtcgatcaactctttacggctggtgtcattatccagcacatccgccagtgcgccataggccgcttttttttgttcgatatccggttccggggccggttcagtcgtactgtccgttgtcgttgtggttgtaacgccgggtatggataccgcgtgggcaggtgcgcccagcaggcagaagaggatgaacaggatccaccgcatgactcctccagtgagaaaatagagcaaaaagataagtatagatgctggaggaggggcgattttaaatgagaggaatctggtgtgcctccctttcgggtgaaagggaggaagggatattaagcaggttgctgacaacgtgcgggcttttttgccggatgcggcgtgaacgccttatccgtcctacaagttcatgcaattttaataagttgccagatatcctgtaggcctgataagcgtagcgcatcaggcaatgtgtcttattaagagacgtgctgcaaaaattcctgcaagcgctggctcggcgggttcttgatcaacacctgcggattgccatcttccgcaatccggcctttgtcgataaagatcagccggctagctactttctcggcaaaaccgatttcgtgggtcacgatcaccatcgtcatcccttcttcagccagatcctgcataaccttcagcacttcatggcgcagttccgggtcaagagcggaagtcggttcatcaaacagcatcattttcggcttcaccgccagcgcgcgggcaatcgccacacgctgctgttgaccaccagaaagttcggaagggtagtgatgtgcacgttctgccagaccgactttcgccagcagctcacgtgccagtttttccgcctcttctttgttcgcgccacgcacgcgtagcgggccaaacatgacgttttccagcgctgtcagatgcgggaagaggtaaaactgctggaacaccatacctgcttcctggcgaatcaggcgctcgtcaactttcggatcgttaaccttcaggccatcgacaatcagatcgccggaggtgatttcttccagtttgttgatgcagcgcagcagggtgcttttaccggaaccggacggcccgataatcaccacgacttcgccctgggcaatgttcaaatcgatattgtgcagcacctgggttgggccaaagtgcttggagacgtttttaaattcaatcacaggattttcatccttctttccagacgacgcagaataaagctcagcaccagggtaataatcagatagaacaccgccacggcgctccagatctcaagggcgcggaagttaccggcaataatttcttgcccctgacgggtcagttccgccacgccgatcacaataaacaggctggtgtctttaatgctgatgatccactggttacccagcggcggcagcatacgacgcagtgccagcggtaaaatgacgtagcgaatggtttcccaacgactaagaccgagcgccagtcctgcttcacgaaaacctttgtggatagacagcaccgcaccacgcgtgatttccgcaatatacgcgccggagttgatcatgatggtgaccaccgccgcagtaaatgggtcgatgcgtaagtcgttaaacgccatcggcagggcgaaataaataaacatcacctggacgacgataggtgtgccgcggatcacttcaataaagaccagcgcgacgtggttggctatccaacctccgaaggtgcgtgcaaaacctgccagcaatccgattaccagaccgcctgccagaccgaggacgctaatccacagggtcattttggcaccttcaatcagaagcggaatggcaggccagatggcactccagtcaaactgcatatgttgttcctgttaccgtggtgtaaataatcaaattcagggtaattaatggccccggagcgggtttgcgcccctcaccctaatcctctccccataggggagagggaactgccagtgcgttttacaggtgtagcgttattatttcggttcagtaccgaaccattttttgtagatttcgttgtaagttccgttctcgcgcagggttttcaacgcgccgttgactttgtcacgcagctcgtcgctacctttcgggaacgcaataccgtattgctgcgcttccagagagtcacctaccgctttgaactgaccgttaccggcggttttgatgaagtacagaatgtttggcgtatcgtgcagaacggcgtctgcgcggttggtgcccagttccatataggcgttatcgatgttcgggaactgacgcagatctttagttttgatgtttgctttcgcgtaatcaacggagccagtaccgctcttcacagcaaccactttcccgtcgagatctttcacgcttttcacatcgttattgttagctttcaccatcactaacaggccgcttttgtagtagccgtcagagaaatcgatcgcttttttacgctcgtcggtgatggtaatgcccgccagcgccagatcgacgtttttggtttgcagtgccggaatgatcccactgaaatccatcggcttcagttcgtaatccagcttcagctctttagcgatggcagcccacagatcaacgtcaaagcccacatatttatcgccctgtttaaattcaaacggaacgaaggcggtatccgtcgcgacaactaattttttatccgcggcatgagaagaaaccgcaaaagccagggtcagtgcagccagactaacttttaatacagacttcatagcatttccttttttctatccacgggacgatcccctgcgtgacattcacatatatgaaaaaatcgtgccagttttgcaactccttgatttttcgagatgcggcaaaaacgtgatgcacgatttatagggcaataccctgaagatgcaccattctggggcaccaatctggtgcgctaaaattgtgcactcaacacagtgattatttagcgtaaaacctgatgaaaaaacaatctttatgtaacgattgtgtgatgatgtggatacaaaaaatttacttaatcagctggagatagcagatggatgcactaaataagtgcgttgaggtgggctgcaaaacaaaacggcctcctgtcaggaagccgcttttatcgggtactaaagttctgcaccatcagcgatggatttattcgatgttagactcgataaaccacaggaatttatccaggtcgcgagacgcggcggtcaggatatctgcggtgtcgtcatctttcgcttcgccaatcgctttgcgtacgtcattagcgacgattgcgtaacggtcagccagttctttcaggtgatcctgaacgttgtggatgtccagcgggtaacttttcagcggggttttgctgttgataacttgagtggtccccagagctacaccgcccagctgcactgcacgttctgccatggtatccagatgatcgatcagtgcggtgcggaagccatccagcatttcatgtacggcaatgaagttagcgccgcgcatgttccagtgcgcttgtttggtaatcaaagaaagatcaataaactggataacctggcgattcagcaactctactgttgcttttttctcgctgtcggagacatcgttgcgggtataaagcagattggtcgctttacttttaactaatttagcggtactcataatttcatatcctcttgatgttatgtcccagtaattaacgagattaagtatagcaccggctatgtgttccgctattctggctgttcctatcacactaatagtggtaacaagcgtgaaaaacaaaactaataaagattcaatgagttagatatattgataagaacaattcttatttatctgctcgccaggaattttcggaataaatatgcttttgcataattcgatatataaagacggtgtagaggaaaagtagcgagaaattctgcatggttatgcataaccatgcagaaatgtaaatttaattaatgtctaattcttttattttgctctctttgcgtactgtcagcgtagaccccatactagcggcgatgatagcgccgagcgccagtagctgtatgggtgtcagtgtttctccgaggaaaatcatcccggaaacggcagccagcgccggttccatgctcatcagcgtaccaaatgtccgtgttggcaaacgggtgagggcaatcatttccaggctataaggcagagcggtgctgagaatagcgacagccagacccaatggaataacgctccagtgccagagtgcttcaccagcctgaagcgctccaattggcacgaaaattaacgctgcaatcaagctaccaattgccaccgtcgcagggccatgttccgctcctgcgcgttgcccacttaaaatgtaaatagcccaacaagccccggcccccagtgccagcgcacagccggttaaatcgacatgggaaacgtcttgccccagcggtagcaggaaccacagaccaagaaccgccagcacaacccagacgaaatctaccgggcgacgagaagagaacagcgccaccgccagtggtccggtgaactccagcgccaccgcaatacccagcggtactgtctgaatagaaagataaaaaagataattcatcccacccaggctaacgccgtaaaacaacagcggtaaccgttgctctttggcaaagcgcagtcgccatggcttaaagaacgcgatgaggatcagcgttcctaatgccagacgcagcgcagtgacacccggtgcgcccaccagaggaaaaagactcttagctaagctggctccaccctgaatagacgccatggcaacgagcaatatgactattggtaaccagaccggcattttacgtaaactaccaggcatcctttctcccacaaatatctagacttaagtaaagcgtggagtgtactggatatacccaatgctggttgagcatttgttgaaaaaattttcccccgttttgactaaaatgcgccaggattgatggaatcattagtctggtgattaggaataatctggatgaatgacagggaaaacatgcgtaatacttacgcagttctctgaaaaagtgatttaaatttagatggatagcggtgtatggaaacgttctgttacatgaaatggcccgttagacatcacaaatcgcgaagagtttcccattaatttttgatatatttaaaacttaggacttatttgaatcacatttgaggtggttatgaaaaaaattgcatgtcttagtgcactggccgcagttctggctttcaccgcaggtacttccgtagctgcgacttctactgtaactggcggttacgcacagagcgacgctcagggccaaatgaacaaaatgggcggtttcaacctgaaataccgctatgaagaagacaacagcccgctgggtgtgatcggttctttcacttacaccgagaaaagccgtactgcaagctctggtgactacaacaaaaaccagtactacggcatcactgctggtccggcttaccgcattaacgactgggcaagcatctacggtgtagtgggtgtgggttatggtaaattccagaccactgaatacccgacctacaaacacgacaccagcgactacggtttctcctacggtgcgggtctgcagttcaacccgatggaaaacgttgctctggacttctcttacgagcagagccgtattcgtagcgttgacgtaggcacctggattgccggtgttggttaccgcttctaatcactttggtgatataaaaaatccgcctctcggggcggatttttgtttttaaggtttcgggtcgaaaatatcggttccgagatggttgtaatccaccttctgtaactggaagttggtgatgtatatcggcccggctttcttctcagatataaacgggtatttgatgttaatttccttcgctttaatccccgtccactgggagaaaaagcctaagaagtcattggcactgcggcgggctttaatcacacgatgcgctttatcgtcgctggaaatgaccataaaaggcacctggaaattttgctgatatttatcatcatgggcaaggtattgcacgtctttaccgcgctctttaaaggccagaccgtggtcagaaaagtaaaccaggctgaagctgctgccgctgttgcgtaactgatcgtacagcttgcgcagtaaatcgtccgtttgcgtcatggtatagagatagcagctcgtttctttgctttgcacaaaggtttcgtattttccttgtgtcctgtcgcaggcctgcggatgactgcccatcagatgtagaacaatcagctgcggttggctgtgctcttgcgccagcacttgagcggtcatatccagtaacgcttcgtctttggtgtttttatctgcttcaaaattaccttctttcaggaagtacacttcatctgctcgtttggcgatgctggcgatagcggtatcgtattcgccgatttgaccctggttggaaaaccaccaggtctggaagcccgcgcgatttgccagggtgacaaagttatcctgaaactgtggtttgccatcgacaacgcgattgagcgttaagccaaggcttttctgcgtggagccactggcggcaatgtagtcagcaaatatcaaaccgttaacgctgctggcaaacggggtattgtcccagtgaccgccaaaggcaccgagggcatcgcgacgcgcgctttcaccgatcaccaccacataggtctgatacttcggcttaacggcagtgaccgtccaggtatctttcattccggaaagttttgccatccgttcttgctcttcaatcacctcgttattattgacgatgacatccttagcaaaacgaaataccggatagccagtatctttcagtttaaatacgccaccccaggccaggttttgcacgggagcaacaaaaaatgtcgccacactgaataccagacacaggctgtcgaaggtattccagcgcgctttttcattctctttttttcgcctgattgctattacgccgagcgcaaaaataaataagccgaccaggtagctgtaccacggaaaaatcgtcaggatttcggtgctctcttccatattggtggagtgcaatgccagcaatgtattgaaattaggcgcgccgtaggcctgagcaaaagggaaataacaagccgccaccaggctactgacaccgaccagaactttttgtacgcgaggcaatgttcgccatagcaaaagcaaaatagccgtaaacgcagcggtgtagagcaaactgaaggggtaacctaagccgaggttaattaataggctctgtaaaaagtagaacgcagtccacgggctaaatacccggctacgggtaacaaggctttctttgagggttaaattcatatgccactatcgtaacaaacgccatgtgcttaccctggcgtcaagggtcaatacctgcaagagtgcgtgaagagtggaaaggggtccgcatccgcgagccgcaatatacgcagggctgcaagaagatagagcgagccgccgtagtggtcaactactgacgaacaaatcttttgcgaaggggattgcaaatccgacaaaaagtggggtttttcagaccaaaacgcgttatgcctgcatgaaagcaggagtgaagcggcgtaccgcgacgccgctatttatcggaaggtttatcttgctgcggtttgttgttgaccatatcgcacaacatagagagcagcattaaccgtactttaaagggagaatgactaaacacgcgcatacacctcttgaactcattcataagacctcctgacttgctaatcccgtcgatccttgaggggtgattgcattacatacagatatagcacaggctatattatatagctattgctaaaacgttaattttttgtaccttcgcaactctggtttacaatgtgcgcacgaaatgagaacgctatgtatgcgtcaccataatgaggaagcacaatgagtcgtcgcgcaggtacgccaacagcaaaaaaagtgacgcagttagtgaacgtggaagagcacgttgaagggttccgccaggtcagagaggcgcatcggcgcgagcttattgatgattacgttgagctgatttctgacttgatcagggaagtgggggaagctcgtcaggtggacatggctgctcgtctgggagttagccaaccgacggtggctaaaatgcttaagcggctggcaaccatggggctgattgaaatgatcccctggcgtggcgtgtttttaacggcagaaggagagaagctggcgcaggaaagccgcgagcgacatcagatagtcgaaaatttcttgttggtgttgggcgtcagtccggaaatcgcccgtcgcgacgcggaaggcatggagcaccatgttagtgaagagacgctcgacgcttttcgtttgtttacccagaaacacggtgccaaatgagcctgccttttttacgcacgctgcaaggcgatcgtttttttcagttattaattcttgttggtatcggattaagctttttcgtgccctttgcaccgaaatcctggcctgctgctatcgactggcacaccatcatcaccttaagcggcctgatgctgctgaccaaaggtgtggagttaagcggttattttgatgtgctggggcgcaaaatggtgcgccgctttgctacggagcgtcggctggcgatgtttatggtgctggcggcggcgctgctttctacctttctgaccaacgatgtcgcgctgtttattgttgttccgctgactatcacgctaaaaagactgtgtgagatcccggttaatcggctgattatttttgaggcgctggcagtcaacgctggtagcctactgacgccaattggcaacccgcaaaatattcttatctggggacgttctggtcttagctttgccggatttattgcccaaatggcaccgctggctggcgcaatgatgctgacgctcctgctcctgtgctggtgttgtttccctggaaaggcgatgcaataccatacgggggtgcaaacaccggagtggaaaccgcggctggtgtggagttgtctggggctgtatatcgtctttctgacggcgctggagttcaaacaagagctgtggggactggtgattgtggcggcaggctttgcgctgctggcacgtcgcgtggtgctcagtgtggactggacgctgctgctggtgtttatggcgatgtttatcgacgtccatttactgacccagcttccagcgttgcaaggcgtgttgggtaacgtgagtcatctatctgaacccgggttatggttaacggcaatcggtttaagccaggtgatcagtaacgtgccgagtaccatattgttgctgaactatgtgccgccgtctttattactggtatgggcggtaaacgtaggtggctttgggttattacccggaagcctggcaaatttgattgcgctacgtatggcgaacgatcgccgcatctggtggcgtttccatctctatagtataccgatgctgttgtgggcggcgttggtgggatatgttttgttagttatactcccggccaactaaggtctggcaaataaaaaaggcggattatgagtccgccttttgctttaagttttgaagattaattcagacgaaccggcatcccggagcggtttttaatcgcttcatcaagaacaacctggtcaacatctggctgaccggtcactgtctgcacgctcttcgtcagggtaattggcacaatttcctgaccttcaaactgggcttcggtggtagacagcgggttatggacttcaatataacggctgccgtctggctcggtggtcgcttttaccggctcatcaataaactgtacgcgggtaccgaccggtactttctcgaacaggaatttgatgtcttcgttacgcagacgcacacaaccatgacttacacgcaggccgataccgaagttggcgttggtgccatggatagcatacaggcgaccgatatagagtgcatacagccccatcgggttatccggacctgccggaacgacagccggaagcggttcgcccgcagcgcggtactctgcgtgcattttggcggtcggcgtccaggtcgggcctgcttttttacgctcaactttggtggtccagttgataggcgtatctttgcctaactgaccaatgccgatcggcagcacgataacggtgttggtccctttcggatagtaataaagacgcatctcagcactgttaatgacgatgccttcatgaacggtatccggcaggatcagctgctgcggaatgttcagtacagtaccgcctttcggcaggaaggtatccacacccgggttcgcttccatcatattggaaagccccatctggtactcggcggcaaaatactccagcggctgagtgttaccttcaggaatggtgatcacctgattctgaccaaccaggcgactcccgtcggttggcagaggataagttaccgcagaggcggtactgcaaaagccgacaacagcgaaggccgctgcgaataatgttttcaatttcatattcatgttaagcgagattttgtgcctggcaggccattgggttgagaatattagagtattggaagcgcattataagttcattccagctcacagtgaaatcagatgtgtacgaaatcacattttttgcctttggcttgagtgtagaccttaagcgaggagcaggatcttctttcagacttatggcataatgcgcggtttgtcatatctcttttcaggatacgcctgtgttagtttccagtaacgtcaccatgcagttcggcagtaagccgttgtttgaaaacatttccgtcaaatttggcggcggcaaccgttacggcctgattggcgcgaacggtagtggtaaatccacctttatgaagatcctcggcggcgaccttgagccgacgctgggtaacgtttccctcgatcccaacgagcgcattggtaaactgcgtcaggatcagtttgcctttgaagagttcactgtgctggatacggtgatcatggggcataaagagttgtgggaagtgaagcaggagcgcgaccgcatctatgctttgccggaaatgagtgaagaagacggctataaagtggccgatctggaagttaaatacggcgaaatggacggttactctgcggaagctcgcgccggtgaactgttgcttggcgtgggaattccagtggaacagcactacggcccgatgagtgaagttgctcctggctggaagctgcgtgtgcttctggcgcaggcgctgtttgctgatccggatattctcctgctcgacgaaccgaccaacaacctcgacatcgacaccattcgctggctggaacaggtgctgaacgagcgtgacagcaccatgatcatcatcagccacgaccgtcacttccttaacatggtctgtacccacatggcggatctggattacggcgagctgcgcgtttatccgggtaactacgatgagtacatgacggcggcgacccaggcgcgtgaacgtctgctggccgataacgccaagaagaaagcgcagattgctgagttgcaatctttcgttagccgctttagcgccaacgccagcaaatctcgccaggcaactagccgcgcgcgccagattgataaaatcaaactggaagaggtgaaagcctccagccgtcagaacccgttcatccgttttgaacaggataagaaactgttccgtaacgcgctggaagtggaaggtctgaccaaagggtttgataacggtccgctgtttaaaaatctcaacctgctgctggaagtgggtgaaaaactggcggtactgggtaccaacggcgtcggtaaaagtacgctgctgaaaacgctggtgggcgatctgcaaccggacagcggcaccgtaaaatggtctgagaacgcgcgcattggttactatgctcaggaccacgaatatgagtttgaaaatgatctgaccgtgttcgaatggatgagccagtggaagcaggaaggcgatgacgagcaggcggtacgcagtattctcggtcgtttgctgttcagccaggacgacatcaaaaagccagctaaagtgctttccggtggggaaaaagggcggatgctgtttggtaagttaatgatgcagaagccgaacattctgatcatggacgaaccgaccaaccacctggatatggaatccattgagagcctgaacatggcactggaactgtatcagggcacgctgatctttgttagtcacgaccgtgagttcgtaagctccctggcgacccgcattctggaaatcaccccggaacgcgtgatcgactttagcggtaattacgaagattacctgcgtagtaaagggatcgagtaagtgattatccgtcaccccgatactgtcggggtgacggcggctgatgacaaatgcaaaatagcctgatgcgctacgcttatcaggcctacgcagtacctgcaatatattgaatctgcaggactttgtaggccggataaggcgttaacgccgcatcaggcattaacaaagcgcatttgtcagcaatctgagtaacgtcgaatcgattttcttaatcccacatcaattcacttccattaattctcaaacatccatgcccaacgctcgcttaccgtgaatgttgaggtcggcaagcgtaaagcgtccttcccagtttgtttcatagtcctcgcgcgggaagtcgcccgggcttgcgcctttttccagtgcggccttcaccttgtgcgcgtaggcaagatttttctcgcacatcggtgccgcaggaatgtacatcacgttgccccaaccttgttgattttcaacgggggcaacggaatggatgacgtcgcagtgccaccagacggagtctccggcttcgagttttggaatgctggttaacgcctcaatcaacagtggatgccattgctcacttaccggcaatactcttccgggcgctacgccgcacagttcatcctccggcacatcatcaagcagcggacgtaacagtacgtacgccatagcttcaggaatgggcacgacgtgcagcagcccctgaccaggcagcatatcagagagcgctgtccagccctggaatgtccgaaacacggaacatttggtggtgttgtccaccgtgtactcttcaacttccgtacgatgtgccgcatgccagggatcatattgcgccagattgccattaaagacgttggcgaaaacgcgctgatacgctggaagcagccagcgttccagtgccccggagtcggtatgcgctccaagacctttggaggtcgttccgggcggacggcggcggatacggtcagggtagatgacgctcacatccgggttaaaccattgctttccatcactttcaaatgtccacagacgattgagaaagctctgcgcattcgccatttcttcactctggcgggcctgcatttgcgcctggctccagtagatggggtaaatctcgggacgactagcgctgagcgtcccgaagaaattatcgccggggcctttgtagacctcgtcaaagcggttgcggtccagatagtccagcatgctctgatcccagcctagcgcttgttcgcgggggaaatggccttttatcaccgcacaaccgcgacgtttaatctgttcgcgctgctctgcagtaacatgacctgctttgatatcggcataagacagcaccggccagacggcatcgccctgtgctttgagtgcgttgatttcagccactcgcgtggcaatgtcatcgcttagctgattaaagatctgctggacgtcgccaagctgcgcccgcagcgcgtgcttcatctgacggatagctgctttgtgatcggcaggcaatgtgtcgctggtaaaagtagaagccataaccacctctcattaactttcattcgaaaccattctgatttgcatgtgacaatataagttataaataagttaatgcaagtttaatgatttgatgtgatgtacaggatgtaaaaagaagggaaaaccggagcgcacggctccggtagagaggtcagctgttaaaaggggatgtgttatccagcaccgcctgaatcacattcagcgcgccttcatgattattatcatcggtagcgtaacgggcgatttgtttaatgttttccgcagcattgcccatcgcaaaggaataacgcgccattttcagcatctccgcatcgttaccgctgtcgccaatcgctaccacattttgcggactcagatcccagcgtttcagtaaccggctaataccgtttgctttatgtagaccgggaataatcaggtcgataaagccaaaaccactggtaacgggtttcataatgccatcgagcgctacgtgcagtttgtcgatcactaacgggatttgttcatccggcaggttgaggctaaacttgaacagtacgtcgtcaatctcctgataatcttttacaggtttcaggcgatggtagtgttttgccatcagtgcgacaaatgcttcgggggcattttcgctgacatatgcactttgcagaccgcaggcgacaaaattgagttgcttatcttttagcaactcgccaataacaatccggctttcatgtcgggtcagttcgccgtggaacaactgcttgccatgttcgtaaaccagtgcgccgttttccgcgacaaaagagatctcatcctttagctcaggaaagaaactaataagctggtaatactgattaccgctggcaacaacgaacttaatgccgcgctttttcagttcctgatattgcgccataaaacgtggttggttgtacgttttggcgtcgttaagaaaagtaccgtccatgtctgtgacgataacttttacgctcataggtgtgctcctggctcgaaaatgaaaccgtaacagtgtaataacaatgtgacgcagagcacaaattatatttcgaatgaaagtaaggatgaaattgatgatgtgaatgatttagcccggcgacgacgccgccgggccgaggagattacagcatatgttcagtacgggcgatgatatcgtcctgagcgtctggagagagcgcggtgaagaacgcggaatagcccgcgacacgcactaccagatcgcgatactgatcgggatgttttttcgcatccagcagcgtttcgcgggaaacgatgttgtactgaatatgccagcctttatgcacttcaaagaaggtacgcagcaggatcatcagtttctgcttgtcagattcgttctccagcgttgccggattcagtttctggttgagcaacacgccgccgagaatcgctgccgtaggcagtttacccacactgccaatgaccgcagtagggccaagatggtcagtaccggaggccgggcttgcgccttctgccagcggggtgtgggctttacgcccgtccggtgttgccatagtctgcgcgccaaacggtacgttagcggagatactactcgtacccgcgtaatagttgccgccaaccggaccacgaccgtagcgcggattatggtactgtttcagttcgtcgatataggtctgataagcgcgagccagcagcgtatcgacagtatcatcgtcgttgccgtacttcggcgcaccgttaatcagccgctgacgcagctgctcgtgagtcaggccgtcgaagtcatctgccagtgcggcagcaagctgttgctgaccaatcgcaccttgttcaaacaccagtttcttcactgccgccaggctgttgccgaggttggcaatgccgacctgcaggccagaaacccagtcatatttcgcgccgccttgcttgatacttttcgctcgctcaatacagtcatccaccagcgcgctgcagagaatatcgtgcacgttctcttccagcatggtgtcgacgacatattcgatttcgatacttttgcgggtgtagtaacggatttgcgtatcccacgcgtccatcacttcatcgaagttgttgaagttacctgcgctcaacgctttttcttgtggcaggaacactttgccgctggtggcatcatgcccgccttccagcgccgccagcatcacgcgggcgaagttgataaagctcatgccggtacagcgatagccccatttgccaccgacggcggtttctatacaaccaatcgctgcgtagtcataagcgtcctgcggttcaataccgagtttaataaattccgggatcacgatttcgtcgttgttgaacgccggcatcccgaagccgcaacggatcacctgtacgcaggcgtcgaggaaatcgttgctcattcctgcatggtaacgcacgctgaggttaggctgagtggaacgcaggcgaccgcaggattcgaggatcgcgtaagagagtggattcaccgcgtccattggttgaccatcaaccagattttgcccgccaatagtgacgttctgatacagcggacttcccgcagaggctttactgtgactgccggagcggatcttgttcacttccagcagtttcagccagcagctatgcagcatctcgatggcgtgttcgcgatccagcgtctggttgagttcaacgtcgcggcgatagtacgggtagagatactggtccatacgaccaaagcttacactgtgaccgttagattcgatctgcaaaatcaactggatgaagtaacacagttgcagcgcctgccagaaagtctgcggcggctggtgggcgataagatcgcagttttctgccatcgccagcagttcatcgcgacggctttcgcgggtttcggtcgcggccatttcacgcgccagggcagcgaaacgttcaatgtgttcactgactgccaccagcacgatatcaatcgctttcaggaattgctcaccgtgtaaatcttccagcaccgtcaggttgatgcggctgcgacgttccgctacttcctcgcgcagaccatcaagccctttttccagcagcagcgggaaattcaccgccaggtgcgcatcgccggaggtcatattgccttccgctttaatgattccggtcgccagcagacctttttgctcatcggtaaacatgccgtagcagcgatcctgtacggtctgaccgcgccaccacgggcacacttcatgcagaacgcgtttgttctcttcgctcaccgcaaagccagcaccgggacgatctgccagatcatcaatctctttttcgatccagctgacagtatattccgggaagatcggcgcggcgcgaacttcgcttgcctggttgccaatgatcaactcatcgtgtttgatccagatggtgcgattcgccaggtgatgcgccagtgccagcgcgcgacgtaccgggatcggcttatcgagatgttgttgatacatctcggtatagtgctgcgcgcgctcggtacagactggcggtttcacaatatgcaccagcgcatttttgtgcgctttaatgcggtcgctgagcgtgtccagtttcagtgtggtcatggttgttatcctcgtaaggtcgcggttaaccctttctggcaggcatactgctgggcaaagtcgagcagttctggcgcatcaagcggtttttccggggcgtcatagggcagattaagtaagtgatatttgttgatgcccagcgtgtggtagggcagaaaatgaatttcgccaacgtgcagctcgtcggcggcaaaatcggtaatggcttttacagaggtttcgtcggcattaaagccctgaatcagcggcacgcggataatgatttttttgcccgctgcggcgagttttttcaggttatccagcactctggcggcgttaccgtcggtccactgtttaaacggcgcgtcggcaacgtgttttaaatcggcaagaaacagatcgatatagggcagagaaggggcgatatatttccacggcacatgcagacaggtttctaccgcagtatgaatgcctgcctcgtggctggcttgcagtagcgccatcgccatttccggctgcataaagggctcaccaccgctaagcgttaaaccgccgccgctgcgatcgtaaaacggtttatcgcgcagaacggtcgtcatgatctcctcaacgcttttcacttcaccacacacggttaatgcctgtgtcggacagcagtcggttaacgccgtcagatgctccggggttaacttttcccgatgaataagcaaaccattcagcgcgcgctcaatcacttccggcgcggccttagcgcacagctcgcagccttccagacacagtcgtgcgtcatacagcagatcctgcgtgcgggcgcggctttccgggttctgacaccagcggcagcccaggctacagcctttaagaaatacgaccgtgcggataccggggccatcatgggtgctgtagcgctgaatattgaaaatcatagttgcctctctatttcgttcaagcattaaaatactttcgaatgaaagttagattgatgtgcgtcaactgttcagagagttttcccgtgatagtctacattcagacaaaaagtacattttgaggatggttatggaactgtatctggatactagtgacgttgttgcggtgaaggcgctgagtcgtatttttccgctggcgggtgtgaccactaacccaagcattatcgccgcgggtaaaaaaccgctggatgttgtgcttccgcaacttcatgaagcgatgggcggtcaggggcgtctgtttgcccaggtaatggctaccactgccgaagggatggttaatgacgcgcttaagctgcgttctattattgcggatatcgtggtgaaagttccggtgaccgccgaggggctggcagctattaagatgttaaaagcggaagggattccgacgctgggaaccgcggtatatggcgcagcacaagggctgctgagcgcgctggcaggtgcggaatatgttgcgccttacgttaatcgtattgatgctcagggcggtagcggcattcagactgtgaccgacttacaccagttattgaaaatgcatgcgccgcaggcgaaagtgctggcagcgagtttcaaaaccccgcgtcaggcgctggactgcttactggcaggatgtgaaagtattactctgccactggatgtggcacaacagatgattagctatccggcggttgatgccgctgtggcgaagtttgagcaggactggcagggagcgtttggcagaacgagcatttaaccggacgttctgcatcctcataaattgctgatgacgtggcggagtgccgcgtcttatcaggcctggaggtggcaattactgcccacacacctcacaccccggattacgcatcagtttcatttcgcgaaactgacaggtcatcgcatcgtacatgacgattttcccgctggccggtttgccataacctgccagcattttgatcgcttccattgcctgcaagctaccaattacgccgatcaacggtgccattgcgcctgcttccacgcaggttaatgcattttcaccaaacaaacggctaaggcagcgatagcacggttcaccgtcctgataagtaaagacggtgatttgaccttccatacgaattgccgcgccggaaaccagcggtaccttcgcggcaaaacagcctgcgttcagttgattacgtaccgcaacgttatccgtacagtcgagcaccagatcgtgttcagcaatcaatgctgcaagttctgcgtcatccagcagtgcattgactggcgtaatcgcgatatgtgggttgatccgcgtcagggcgtcacgggcggattccaccttcggttgcccgaccgtggcatcactgtgcagtgtctggcgttgcagattgctgaggctaaccgtgtcgaagtcgagcagcgtcaggttaccgacaccggcgcttgccagatactggctggctgcacagccgaggccgcccaggcccactatcagcacgcgagaatctttcagcgcctcctggccgtcaaaatcaaagccgcgcagaatgatttgccggttgtagcgcagcatctcctgatcgctgagttccgccattacaggcctccgaacaacgcgttaaacggttctacttccacccattcgcccacttccacattgccgcgatcgcgttccagcacgataaagcagttgccgaggctaaaggagctaaatatatgactaccctgatgtccggtggtcgtcacttccagttcgccatcggcgttgcgttgcagcacgccgcgctggaaatcaagacgtcctggcgtttttttcaggcgggacgctgtgcgtacgcgctggcgcgcgggcaggccgctggcggtgttaccgcttagttttgccagcaaaggctgtaccagttgatagaaggtcagcgtcgcactaaccgggttgcccggcaggccgcagaaccagctattgctgagtttaccgaacgcgaacggtttacctggtttaatcgccagcttccagaaggcgatctcccccagctcttcaagaatcgttttggtgtaatccgcctcacccacactaacaccgccggaactgatcaccacatccgcctggctgtcggcttcaataaatgcggcgcgcagggcatggggatcgtcgcggataatccctaagttaattacctcgcatcccaactgttctaacatcaggtgtacggcgagacggttggtatcgtagatttggccgtcgcccagcggctgaccgggcaactggagttcatcaccggtagaaaaaagcgctacacgcactttacgaatcaccggaacttcggcaatccccagactagcaattactggcagctctgcggtagtcaggcgagttcccgccgggaaaacaaccgcacctgcagagatatcttcaccgcgacggcgaatattttgcccgctacgcacttcagcagtaaaacgcacgccattgtccatttgttcagtctgctcctgcatcaccaccgcttcgcagccttccggcaccggcgcaccggtcataatacgaatgcaggtacccgcaggccattcaccatggtatggctgaccggcaaaggatttaccggcaacgggcagcggttgcccggaggcaatatcggctaaacgcaccgcgtagccgtccattgcggagttatcaaaccccggaacatcaagcgggctaacgacatcgctcgccagaatacgaccaaaacactgtaccagtggcagcgtttcctgggcggtcagtggggtgacgcgagaaagcatctcattaagcgcggtgtcgaggctcatcaatccggtggtaaattccatgaaaacactcctgcggaggcaaaatcgaatttgcctattatgtcagaaaaacgccacagactgtatgccacctcgggcgtagcgctgggtcctgcctttacatgccatatccatctttctatattcaaaaattgaatgagtaattcataaaaattctgatatttatagcaaaagtggcgaaccacccttaatggacgaatactatgggcaaagcagtcattgcaattcatggtggcgcaggtgcaattagccgcgcgcagatgagtctgcaacaggaattacgctacatcgaggcgttgtctgccattgttgaaaccgggcagaaaatgctggaagcgggcgaaagtgcgctggatgtggtgacggaagcggtgcgtctgctggaagagtgtccactgtttaacgccggaattggcgctgtctttacgcgtgatgaaacccatgaactggacgcctgtgtgatggatggtaacaccctgaaagccggtgcggtggcgggcgttagtcatctgcgtaatccggttcttgccgcccggctggtgatggagcaaagcccgcatgtgatgatgattggcgaaggggcagaaaattttgcgtttgctcgtggcatggagcgcgtcagcccggagattttctccacgtctttgcgttatgaacaactactggcagcgcgcaaggaaggggcaaccgtcctcgaccatagcggtgcgccactggatgaaaaacagaaaatgggcaccgtgggggccgtggcgttggatttagacggcaatttggcggcagccacgtccacaggcggaatgaccaataaattacccggacgagttggcgatagtcccttagtgggtgccggatgctacgccaataacgccagtgtggcggtttcttgtaccggcacgggcgaagtcttcatccgcgcgctggcggcatatgacatcgccgcgttaatggattacggcggattaagtctcgcggaagcctgcgagcgggtagtaatggaaaaactccctgcgcttggcggtagcggtggcttaatcgctatcgaccatgaagggaatgtcgcgctaccgtttaacaccgaaggaatgtatcgcgcctggggctacgcaggcgatacgccaaccaccggtatctaccgtgaaaaaggggacaccgttgccacacagtgatgaacttgatgccggtaatgtgctggcggttgaaaatctgaatattgcctttatgcaggaccagcagaaaatagctgcggtccgcaatctctcttttagtctgcaacgcggtgagacgctggcaattgttggcgaatccggctccggtaagagtgtgactgcgttggcattgatgcgcctgttggaacaggcgggcggtttagtacagtgcgataaaatgctgttgcagcggcgcagtcgcgaagtgattgaacttagcgagcagaacgctgcacaaatgcgccatgttcgcggtgcggatatggcgatgatatttcaggagccgatgacaagcctgaacccggtatttactgtgggtgaacagattgccgaaagtattcgtctgcatcagaacgccagtcgtgaagaagcgatggtcgaggcgaagcggatgctggatcaggtacgcattcctgaggcacaaaccattcttagtcgttatccgcatcaactctctggcgggatgcgccagcgagtgatgattgcgatggcgctgagttgccgcccggcggtgctgattgccgatgagccaaccaccgcgctggatgtcactattcaggcgcagatcctgcaattaatcaaagtattgcaaaaagagatgagcatgggcgttatctttatcactcacgatatgggcgtggtggcagagattgccgatcgggtactggtgatgtatcagggcgaggcggtggaaacgggtaccgtcgaacagatttttcatgcaccgcaacatccttacacccgtgcgctgttagctgctgttccgcaacttggtgcgatgaaagggttagattatccccgacgtttcccgttgataagccttgaacatccagcgaaacaggtcccccccatcgagcagaaaacggtggtggatggcgaacctgttttacgagtgcgtaatcttgtcacccgtttccctttgcgcagcggtttgttgaatcgcgtaacgcgggaagtgcatgccgttgagaaagtcagttttgatctctggcctggcgaaacgctaagcctggtgggcgagtctggcagcggtaaatccactaccgggcgggcgttgctgcgcctggtcgaaagccagggcggcgaaattatctttaacggtcagcgaatcgataccttgagtcccggcaaacttcaggcattacgccgggatattcagtttatttttcaggacccttacgctagcctggacccacgtcagaccatcggtgatagcattatcgaaccgctgcgtgtacacggtttattgccaggtaaagacgcggctgcacgcgttgcgtggttgctggagcgcgtgggcctgttacctgaacatgcctggcgttacccgcatgagttttccggcggtcagcgccagcgcatctgcattgctcgcgcgttggcattgaatccaaaagtgatcattgccgacgaagccgttagcgcgctggatgtttctattcgcgggcagattatcaacttgttgctcgatctccagcgtgatttcggcattgcgtatctgtttatctcccacgatatggcggtggtagagcggattagtcatcgtgtggcggtgatgtatctcgggcaaattgttgaaattggtccacggcgcgcggtcttcgaaaacccgcagcatccttatacgcgtaaattactggcggcagttccggtcgctgaaccgtcccgacaacgaccgcagcgtgtactgctgagcgacgatcttcccagcaatattcatctgcgtggcgaagaggtggcagccgtcagcttgcaatgcgtcgggccggggcattacgtcgcacaaccacaaagtgaatacgcattcatgcgtagataacattcaggcggagaataaaatggcaagagctgtacaccgtagtgggttagtggcgctgggcattgcgacagcgttgatggcatcttgtgcattcgctgccaaagatgtggtggtggcggtaggaagcaatttcaccacgctcgatccgtatgacgcaaatgacacgttatctcaggccgtagcgaaaagcttttaccaggggctgttcggtctggataaagagatgaaactgaaaaacgtgctggcggagagttataccgtttccgatgacggcattacttacaccgtgaaattgcgggaaggcattaaattccaggatggcaccgatttcaacgccgcggcggtgaaagcgaatctggaccgggccagcgatccggcgaatcatcttaaacgctataacctgtataagaatattgctaaaacggaagcgatcgatccgacaacggtaaagattaccctcaaacagccgttcagtgcgtttattaatattcttgcccatccggcgaccgcgatgattagtccggcagcgctggaaaaatatggcaaggagattggtttttatccggtgggaaccggaccgtatgaactggatacctggaatcagaccgattttgtgaaggtgaaaaaattcgcgggttactggcagccaggattgcccaaactggacagcataacctggcgtccggtggcggataacaacacccgcgcggcaatgctgcaaaccggtgaagcgcagtttgctttccccattccttacgagcaggccacactgctggagaaaaacaaaaatatcgagttgatggccagtccgagtattatgcagcgttatatcagtatgaacgtgacgcaaaagccgttcgataacccgaaggtccgtgaggcgctgaattacgccattaaccgtccggcgctggtgaaagttgcctttgcgggctatgcaacgccagctactggtgtggtaccgccaagtatcgcctacgcgcaaagttataaaccgtggccttacgatccagtgaaagcgcgcgaattactgaaagaggcgggatatcccaacggtttcagtaccacgctgtggagcagtcataaccacagcaccgcgcagaaagtgctgcaatttacccagcagcagttagcgcaggtcgggattaaagcccaggtgactgcgatggatgccggacagcgggcggcagaagttgaaggtaaagggcaaaaagagagcggcgtgcggatgttctacactggctggagcgctagtaccggcgaagcggactgggcactaagcccgctgtttgccagccagaactggccaccgacgctgtttaataccgcgttttacagcaataaacaggtggatgacttcctggctcaggcactgaaaactaatgatccggcggaaaagacccgcttatataaggcggcgcaggatatcatctggcaagaaagcccgtggatcccgctggtggtagaaaaactggtgagcgcacacagtaaaaacctgaccggtttttggatcatgccagacaccggcttcagctttgaagacgcggatttgcaataagcaacgcagggagtggaatgcttaattacgttatcaaacgcttactggggttgattccgacgctgtttatcgtcagcgtgctggtgtttttatttgtccatatgctgcccggcgatccggcgcgattgattgccgggcccgaagctgatgcgcaggttatagaactggtgcgtcagcagctggggttggatcagccgctgtatcaccagttctggcactatatcagcaatgctgtgcagggggattttggcctgagcatggtgagccgtcgtccggttgccgatgagattgccagccgctttatgccaacgctgtggctgaccataaccagtatggtctgggcggttatatttggtatggcggcgggaattatcgccgccgtctggcgtaaccgttggccggatcgattgagtatgaccattgcggtgagcgggatcagctttccggcatttgctctggggatgcttttaattcaggtattctccgttgaactgggctggctgcctaccgtgggagcagacagttggcagcactacattttaccctccctgacgctcggcgcggcagtggccgccgtgatggcgcgctttacccgcgcgagctttgtcgatgttttaagcgaagattatatgcgtaccgcgagggcgaaaggggtgagcgaaacctgggttgtcctcaaacacgggctacgtaacgcgatgatcccggtagtgaccatgatgggcttacagtttggctttttgctcggtggttccatcgttgtggagaaagttttcaactggccgggacttggacgcttactcgttgactccgtagaaatgcgtgattacccggtgattcaggcggaaattctgcttttcagcctggaatttattcttatcaacttagtggtggatgtgctttacgccgccattaacccggctatcaggtacaagtaaggatgcgactatttaactggcgacgtcaggcggtgttaaacgccatgccactggtcaaacctgaccaggtacgtacaccgtggcatgaattctggcgacgatttcgccgtcagcatatggcgatgaccgccgcattattcgttattttattgattgtggtggccatttttgcacgctggatcgctccctatgacgccgaaaattattttgattatgacaatctgaataacggaccttctttgcagcactggtttggcgtcgatagtctggggcgtgacattttcagccgtgtcctggttggtgcgcaaatcagcctggcggcgggcgtgtttgccgtgtttatcggtgcggcgatcgggacgttgctgggcttgctcgctggatattatgaaggctggtgggatcggctgatcatgcgcatttgcgatgtgctgtttgccttcccgggtattttactggcgatcgctgttgttgcggtgttgggaagcggcattgctaacgtgattattgcagtcgccattttttccatccccgcgtttgcccgcctggtgcgcggcaacacgctggtgttgaaacagcaaacctttattgagagtgcacgcagtattggtgccagcgatatgaccgttttgttgcgtcatatcctgcctgggaccgtctcttctatcgtggtgtttttcaccatgcgcattggtaccagcattatctctgccgccagcctcagttttctcggcctcggtgcgcagccgccgacaccagagtggggagcaatgctcaatgaggctcgagcggatatggttatcgcgccgcatgtcgctgtttttccggccctggctatttttctgaccgtactggcgttcaatttgttgggcgatggtttacgcgatgcgctggatccgaaaattaaaggataattacgtttgaatattgcttgaaagggtaatcacctcacaggaaattattgccctaagcaagtgttgtaactttctgctgattttgtagaatcgggtaatttggttaaaaagccgcagcaagggacaatttttgcagcggcacagcgttcagatagttattttgttaaatgtattaacatgctgagtttatacgaaaagataaagataaggctgataattttatttttattggcagcactgagttttattggtctttttttcatcattaactatcaactggtaagcgagcgcgcggtaaaacgtgccgatagccgctttgaacttattcagaaaaacgttggctatttctttaaagatattgaacgtagcgccctgacattaaaggacagtctgtatttattaaaaaatacagaggagattcaacgcgccgtgattcttaaaatggaaatgatgccatttttagacagcgtgggactggtacttgatgataataaatattatctttttagccggagggcgaatgataaaatcgttgtttatcatcaggaacaagtaaatggaccgcttgtcgacgagagtgggcgggttatttttgccgattttaacccaagcaaacgaccgtggagcgtggctagtgatgactctaacaacagctggaatccggcatacaattgctttgatcgtccgggtaaaaaatgtatctcttttacgctacacatcaacggcaaagatcacgatttgttagcggtggataaaattcatgtcgatttaaactggcgatatctgaacgagtatcttgatcaaatcagcgctaatgatgaagttctatttttgaaacaaggccatgagatcattgccaagaatcaactcgctcgtgaaaaactgattatttataatagcgaaggtaattataatattattgattctgtcgatactgaatatatcgaaaaaacaagtgcggtgccaaacaacgcattattcgaaatctatttttattatcctggcggtaatttattgaacgcaagtgataaacttttttatctgccgtttgcgttcattattatcgtattgctggtggtttatttaatgaccactcgtgtgttccgtcggcaattttctgaaatgacagagctggttaatacgctggcgtttttgcctgacagtacggatcaaatcgaggctctgaaaattcgtgaaggcgatgcgaaagagattatcagcatcaaaaatagcatcgcggaaatgaaagatgccgaaattgaacggagtaataaattgctcagtctgatctcttacgatcaggaaagtggttttattaaaaatatggcgattattgagtctaacaataatcagtatctggctgtggggatcatcaaactgtgtggtctggaagccgtggaagcggtgtttggtgttgatgagcgcaataaaatcgtcaggaaattgtgtcagcgaattgccgagaaatatgcgcaatgctgcgatatcgtgacattcaatgccgatctctatttacttctgtgtcgggaaaatgtacagacatttacccgtaaaatagcgatggtaaacgattttgacagcagctttggctaccgcaatctgcgcatccataagtctgccatttgtgaacctttgcagggggaaaacgcctggagttacgcagaaaaactgaaactggcgatttccagtatccgtgaccatatgttcagtgagtttattttctgtgatgacgcgaaactcaacgaaatagaagagaatatctggattgcgcgtaatattcgccatgcaatggaaattggcgaactattcctcgtctatcaaccgatcgttgatattaacacccgcgccattctgggcgcggaggcgttgtgccgttgggtgtctgcggagcgggggatcattagtccgctgaagttcattaccattgctgaagatatcgggtttatcaatgagctgggttatcagattattaaaacggcaatgggtgaattcagacattttagtcagcgtgcgagcctgaaggatgatttcttactgcatattaatgttagcccctggcagttaaacgaaccacactttcatgagcgttttaccaccatcatgaaagaaaatggcctgaaggcgaacagcctctgtgttgagatcactgaaaccgtgatcgagcgaattaatgaacatttttatctcaatattgaacaactgcgtaaacaaggggtacggataagcattgatgactttggcaccggtttgagtaacctgaaacgtttttatgaaattaatccagacagcataaaggtggacagccaattcaccggcgatattttcggtactgcgggaaaaattgtgcgcattattttcgacctggcacgctataaccggatcccggtgattgcggaaggcgtagagagcgaagacgttgcgcgcgaattaatcaaattaggatgtgttcaggctcaggggtatctgtaccagaaacccatgccattctccgcctgggataaaagtggaaaattagtaaaagagtaatttacgtatgtccagaatcaataagttcgtacttacagtcagtctgctgatttttatcatgattagtgcagttgcctgcgggatctacactcaaatggtaaaggaacgggtgtatagcctgaaacagtccgttattgatactgcttttgcggtggcaaatattgctgaatatcggcgtagcgtggcaattgatcttatcaacacgctaaatcccacggaggaacagctgttggttggtttgcgcacagcttacgccgacagcgtttccccctcttatttgtacgatgtcggtccttatctgatttccagtgacgaatgtattcaggtaaaggagttcgagaaaaattattgtgcagatattatgcaggttgtgaagtatcgacatgtcaaaaatacagggtttatctcttttgacggtaaaaccttcgtctattacctctatccggtaactcacaatcgtagtctgatatttttgcttggtctggagcgtttttctttactgagtaaaagcctggcgatggacagcgagaacctgatgttctctctatttaagaacggtaaaccggtgaccggtgatgaatataatgctaaaaacgccatcttcaccgttagcgaagcgatggagcacttcgcctatttgccgaccggattgtatgtatttgcgtataaaaaagatgtttatttgcgggtttgtacattgattattttctttgccgcattggtggcagtgataagcggtgccagttgcctctatctggtacgcagagtgattaatcgtggtattgtggagaaagaagccatcattaataaccattttgaacgcgtactggatggcgggcttttctttagcgctgccgatgtcaaaaaactctacagtatgtataacagcgcgttcctggacgacctgaccaaagcaatgggcagaaaatcctttgacgaagatttaaaagcgctgccggaaaaaggcggttatttgtgcctgtttgacgtcgataaattcaaaaacattaacgacaccttcggtcatttgctgggcgatgaagtgttgatgaaagtggtgaaaatccttaaaagtcagatcccggtagataaaggtaaagtctaccgcttcggcggtgacgaatttgcggtgatttatacgggtggaacgctggaagagttgctaagcattctaaaagaaatcgttcatttccaggtgggaagcattaatttaagtaccagtatcggtgtagcacatagtaatgaatgtcctaccgtcgaacgcttgaaaatgctggcggatgagcggctgtataagagtaagaaaaacggcagggcacagattagctggcagtaatcattattcgcaggccggacaaatgattttgcccggcctgaattaattaaacccggctaccccacaaatcgtactcatcggcgtgctcgactttcacacgcaggatatcacccggcttaacgttggtttcaccattgagataaaccgcgccgtcgatttccggtgcatctgccatgctgcgaccaatcgcgccttcttcgtccacttcgtcgataatcaccagaatttcacggcccactttctcttgcaggcgctcggcggaaatctgctgctgcagctgcatgaaacggttccagcgttcttctttaacttcttccggaacctggtcaggcagggcattggcgtctgcaccttcaaccgggctgtatttaaagcagccaacgcgatccagacgcgcttctttcaggaagtcgagtagcatctggaaatcttcttctgtctcgccagggaagccgacaataaaggtactgcgtagggtcagttccgggcagatttcgcgccactgtttgatgcgcgccagttggcgatctacagaacccggacgcttcatcagtttgagaatgcgcgggctggcgtgctgcaacggaatgtccagatacggcaggattttgccttctgccatcagtgggatgacgtcgtccacatgcggataagggtaaacgtagtgcagacgtgtccagatccccagtttgcttaactgttcgcacaggctgaccatgctggtttttaccggctcgccgttgtggaagccagtacgatgtttaacatcaacgccataggcggaagtatcctggctgatcaccagaatctctttaacgcccgcatctaccagacgtttcgcttcacttaacacttcgccaatcggacggctcaccaggtcgccgcgcatagacggaataatgcagaaggtgcagcggtgattacagccttcagaaattttcagataggcataatgacgcggcgtcagtttcacaccttgttctggcaccaggctcaggaatgggttgtgtttcggttttggcacgtagtgatgaacgtgctccagaacctgctcatagctatgaggcccggtgatttccagcactttcgggtggacttcgcggatctgatcttcttttgcccccagacaaccggtcacaataaccttgccgttttcattcaacgcttcaccaatggcttccagactttcttgtaccgcgctgtcaataaagccgcaggtgttgacgatcaccatgtccgcatcgtcatagctcggtaccacgtcataaccttcagtgcggagttcggtgagaatacgctcactatcaacaaggtttttcggacagccaagggaaacaaagccgattttcggctggggagttactttgctcatagcttaaaaaatattcagttacaggaaaggtcagggcagggattctacagagttctggataaaatttgtatcgcaatctcattcgctggcggaggcgaaggaaatgtaaattttgttaattcggcgtgaagaattgatcctggacagcattttgctcaaaaaatagccatactatttaattgcaacaaggctgggaagaggaggatcgaagtatgttcgttgacagacagcgaatcgatctgctgaaccggttgatcgacgcacgcgttgacctcgccgcatacgtgcaactgaggaaggcaaaaggatacatgtccgtcagcgaaagcaatcatctacgagataacttttttaaactgaatcgcgaactgcacgataaaagcctgcggttgaatcttcatctggatcaggaagagtggagtgctcttcatcatgctgaagaagcattagcgacagccgcagtatgtttgatgagtgggcaccatgattgcccgactgttattaccgtcaacgccgataagcttgaaaattgtctgatgagcttaacgctgagtatccagagcctgcagaagcacgccatgcttgagaaggcctgaaaactaagggggagaaagcgtctcccccttcatgtttaagtttttgtaaaaatgaatttgttatctcctccactgactacgctttaagccagagtcaatccggaggcgttatgcatcgacaatcctttttccttgtgccccttatttgtctttcttccgctctctgggcggctcctgcaacggtaaatgtcgaagtactgcaagacaaactcgaccatccctgggcactggcctttttacccgataatcacggtatgttaatcactctgcgcggcggcgagttgcgtcactggcaagcaggaaaaggattatctgcgccgctttccggagttccggacgtttgggcgcacgggcagggcggcctgctggacgtggttttagcgcctgattttgctcagtctcgccgcatctggttaagttattccgaagttggcgatgatggcaaagccggaactgctgtgggttatggccgcttaagtgatgatctcagtaaagtgaccgacttccgcaccgtctttcgccagatgccaaaactgtctaccggcaaccattttggcgggcggctggtattcgacggtaaaggttatctttttattgctctgggcgaaaacaatcagcgcccgacggcgcaggatctggataaattacagggcaaactggtgcgtctgaccgaccagggcgaaatcccggatgataatccttttataaaggaatccggtgcgcgcgccgagatctggtcttatggcattcgtaatccgcaaggaatggcgatgaatccgtggagtaatgcactgtggctgaatgaacatggcccgcgcggtggtgatgaaattaatatcccgcaaaaaggcaaaaactacggctggccgctggcaacctggggaatcaactatagtggctttaagataccggaagcgaaaggggagatcgtcgccgggaccgagcaacctgttttttactggaaagatagccccgctgtgagcggcatggccttctataacagcgataaattcccccagtggcagcaaaaattatttattggcgcgctgaaagataaagatgtcattgtgatgagcgtcaacggcgacaaagtgacagaagatggccgtattttaacggacagagggcagcgaattcgtgatgttcgcactggacccgacggttatttatacgttctcaccgacgagtccagtggggaattacttaaagttagcccacgcaattaactaacgggaatcatcaccactttgcgcactgcggggcgttcagtgagttgctgataccagcgttgcagatttggacgcggtgtccaggtcaggccaacgttaaacaaattgtagatgaacggtgcgatagcgatatcgcccacaccaaactcgtcgccagagaaccattttacttttgccagttccgcatcgagcagggcaaacagggcgtcgcactctttgcaactggcatcaatggcggcctgatcgcgctcttccggtggtgttctgactaatcccatcaggatcccgcgatgagcattactgagcgtctggtttgcccagtccatccatttttccgcttccgcacgacgtgccggactgtcgatccacaggcgtttttgcccgtactgtgccgccagatagcggacaatggcgttactttcccaaagaatgagatcactttcgtcgtcacgcaacaacggcaccagcccgttagggttcatcgccagaaaatcagcatcgtgatttatcccaaactcacggcccgcgagaatttgctcataaggtagttccagttcttcgagcgtcagcaatactttttttacgttagtactattattccgaccccacagcgtaatcatactcaccccttttccgacaggcagccacaggctgaacaggactccgatggtgaagtaaagttaacttttaagcaacagctggcaaaaaaatgacaccagaagcagcgaagcggcaggatattgcataaactttaaaaactttaccaacttacggtttctttaagtttgtgtgtgcgttattaatcaccaaacttatcatacggcgatataacgtattttttttgaatggatactcgggtggcatttatgacgcaatactcctctctccttcgtggtcttgcagcgggttctgcatttttattcctttttgccccaacggcattcgcggcggaacaaaccgttgaagcgccgagcgtggatgcgcgtgcatggattttaatggattacgccagcggtaaagtgctggcagaaggcaatgcggatgagaaactggatcccgcgagcctgactaaaatcatgaccagctatgtggttgggcaggcgcttaaggccgataagattaaactcaccgatatggtgacggtcggtaaagatgcctgggcgacgggaaatccggcactgcgtggtagtagcgtaatgttcctcaaaccgggcgatcaggttagcgtggcagacttgaacaaaggtgtgattatccagtccggtaatgacgcctgtattgcgctggctgattacgttgccgggagccaggagagttttattggtctgatgaatggttatgccaaaaaactgggtctgaccaacactaccttccagacggtgcacggcctggatgcgccggggcagttcagcaccgcgcgcgatatggcattgctgggtaaagcattgatccacgatgtgccggaagagtacgccattcataaagagaaagagttcaccttcaacaaaattcgtcagcctaaccgtaaccgtctgctgtggagcagcaatctgaatgttgatggcatgaagacaggaaccacggcaggcgcgggatataatctggttgctagcgctacccagggcgatatgcgtttaatctccgtagtgttgggggcgaaaaccgaccgtatccgttttaatgagtctgagaaattattgacctggggtttccgcttctttgaaaccgtgacgccaattaaacctgatgccacctttgtgactcagcgcgtctggtttggtgataagagcgaagtgaatctcggggcaggtgaagcgggcagtgtgaccataccgcgtgggcagctgaaaaacctgaaagcgagttatacgttaacggaaccgcagcttaccgcaccgctgaaaaaaggtcaggttgtcgggaccattgatttccagcttaacggtaaatccattgagcagcgtccgctgatcgtgatggaaaatgtggaagagggcggattctttggtcgggtgtgggatttcgtgatgatgaaattccatcagtggttcggcagctggttctcttaatcttctgataaccggatggcgcgaaacgtcatccggttatacgtcattaatacatcaacttaatgcgctgcgtctgcgcgtacttcacatactcatcttccgggcaacaatcgctcaccacaatatcaaagcgtttcaggtcacccatgcgcgccggacgcaccttgccaaatttactgtggtcgacaaccagcacatgcttttgcgccatgctcatggcccagtgttttaccggcaactcttcaagattaaaacaggtagcgcctttactgacatgcacgcccgccgcagaataaaaagcgatatccgggcaaaaattattcagcgtttgctgaaaatcgatgggtttgaaaatggcgttgctggcgtgaaattcaccaccgcaaagaaacgcgcggcaatggggtttctctttcagcgccagaaaggtatttaggctataacaaacggcggtaaaagggatttcattatcaatcgcttcaataatccacggcgtggtggtgccacagtcaaaaaagagggtctgatcgggttctaccagcgtcgcagccagttttgccgcccggcgtttttcttccaccaggcgggatttttgatcgcttaacaggtaatggctggcactgcgcggttccagaacaatatagccgccgagcaaaacgacgggcgcactgtggttgttcagatcgcgacgaatcgtcatctcgctaaccccaagcagggcggcggcgtctttaagatgtaacttatcgctgcgttttaattcttgcagcagctgcccgatacgctcttcgcgacgtgtttccataatccctctgaatagttattgaagcgagccgctcaatactacactttttagcagagatcagtcacgcacccagcctttgcggatcggtaatgcaaaacagacgcgataccagctttgcagacgttgatagagtttatgccccatcgcttgccagataatctgggcactaaggcagccaatcatacctgccagcaatccaccgagcatatccagcggccagtggacgccaagataaacgcggctccaggcaatgacgacggccagcaccattaaaagactgccggaccacaggcgatgccagcataaaaatgccagtgcaaaggtgaaaatcaccgtaccgtgatcgcttgggaaactgtcatccgccgcatgatgcaggaagttatagccgatattttcgacaaagggtcggtcgtgcggaaaaagatgtcccatcgtccaggacacaaacaggctgaccgccagcgcgatagcgatttttatcaccagttgccgttgtgctgtaagcccccacaaccaaagtaccacggccagcaacggcaccacggtaatcaaatctttagcaataaaaatcgccaagctgatcatccacggagcgctgtctggcgtcgcgttaataagagagaatagagagagattcaaattttccagcataacttcccgacgcaaagtgattaaaagggagccaatacaggcaagtcgttgagaataaagtgcaggttaaactgggtaaagcggcatcgtcttatttccctcaagcggcctgtttacggtgggtgattgtaacgggcataggttaaataaaacttaaagaaagcgtagctatactcgtaataatgtaagaatgtgcttaaccgtggtttcagctacaaaattcgctttctcgttagctgcgcttttattaaactctgcgcgattattattggcgaagaaattgcatgcaaaataaattagcttccggtgccaggcttggacgtcaggcgttacttttccctctctgtctggtgctttacgaatttagtacctatatcggcaacgatatgattcaacccggtatgttggccgtggtggaacaatatcaggcgggcattgattgggttcctactagcatgaccgcgtatctggcgggcgggatgtttttacaatggctgctggggccgctgagcgatcgtattggtcgccgtccggtgatgctggcgggagtggtgtggtttatcgtcacctgtctggcaatattgctggcgcaaaacattgaacaattcaccctgttgcgcttcttgcagggcataagcctctgtttcattggcgctgtgggatacgccgcaattcaggaatccttcgaagaggcggtttgtatcaagatcaccgcgctgatggcgaacgtggcgctgattgctccgctacttggtccgctggtgggcgcggcgtggatccatgtgctgccctgggaggggatgtttgttttgtttgccgcattggcagcgatctcctttttcggtctgcaacgagccatgcctgaaaccgccacgcgtataggcgagaaactgagtctgaaagaactcggtcgtgactataagctggtgctgaagaacggccgctttgtggcgggggcgctggcgctgggattcgttagtctgccgttgctggcgtggatcgcccagagcccgattatcatcattaccggcgagcagttgagcagctatgaatatggcttgctgcaagtgcctattttcggggcgttaattgcgggtaacttgctgttagcgcgtctgaccagccgccgcaccgtacgtagcctgattattatgggcggctggccgattatgattggtctattggtcgctgctgcggcaacggttatcagtagccacgcgtatttatggatgactgccgggttaagtatttatgctttcggtattggtctggcgaatgcgggactggtgcgattaaccctgtttgccagcgatatgagtaaaggtacggtttctgccgcgatgggaatgctgcaaatgctgatctttaccgttggtattgaaatcagcaaacatgcctggctgaacgggggcaacggactgtttaatctcttcaaccttgtcaacggaattttgtggctgagcctgatggttatctttttaaaagataaacagatgggaaattctcacgaagggtaaaaaaatgcctgactgctttgtgcgatcaggcattctcgaattaatggtgatggtcgtcaatctggtgttcgataaccatcccttcacctacgctggcaagatggcgaacataaggatgcgggcggtaagccggagctggcgcaggagccacatagacggtttgcggcacagtcgcgacgctgaccgcttgtggaacgctgacactatcaggaaccacaaccactttgtatccactcggcacatcgacggtgacactttgcgccatcgccacaccagtaaagcccattaaaagcgcgcccaacagtagacaatttttcataatcatttcgcctgaaataatgcagcgggttaatttccgcgaattatgcagccttcattcaggcattgtgttgccgggcgtgctgccggttttattggtcaaatggcgcttcgtgtttaagaactttatcgatcacatccagtacgccttcacggttattggagcctgcgcggtattttgccgctgcgacgaccgcgctaccggcattttccattgcaaaactaaagcctgcctgacgcagcatctcaatatcgttaccgccatcgccaaagaccaccacttcgctgtcgtctattccccataatttctgcagttggcgaaggccattggctttatgtacgccggggataatcagatcgatgctgccgttgccggtgtggacgctcaccataatatcgccgatggcctcatgtaatgctttttgtacttgtggaatcagttcatcggaaagattcaggccaaacttaaagaagatatcctctaagttgtcaaagttatcgacgtattccagacggtgataatacatttccgccaccgttttcatggcatcgtcatattttttgagtgtataggcactattttttccgcaggcaataatttccacttccgggcgcgtcagcaaatgttccacgacagtagcaaacgcatccttgcttagctcgccattaaaaacatctttgccttcgctcactacccagccgccgttttcagccacaaaggcaatttcattagcaatttcagggaagaaagagatcaactgataatattgattcccgctggcgactacaaagcgaattccttgcgctttcatttgctgatactgagccataaaccgctcacggttataggttttttgatcgcttaagaaagtaccatccatgtctaccgcaattaatttaatgctcatcaactattctccatcgccgtctgcgttttggtatcgggtttggcgacggctttcgcgacaatagccgcgagaataaccagcgccagtacaaccagcattgcactacgtaatccataatgttcgccgagatagcccagcagcggcggcccgacgaggaaagccagataaccggtcgttgctaccacactgacgcgggttggtgcatcggggccggtatcgctggcggcagaaatggtcagcgggaagcccaggctggcacccagtccccagagtacaacagacaccccagcgacccaggcgctatcgacaaaaataatcagcccaatacccaacgcccccattagtgcactggcccgaaccacggcaacgcgactgtaacggtcgatgaaccaaccgccggtgaagcgtccaacggtcatccccagggtaaaaccggcataaatcaggctgccggaagtagggctaaaaccgtgaccgtcaaccattaataagggtaaccagtcgttggcagaaccttcggcaaaggccatcgccagcaccacaacacctatcagcagcaactggatatcgcgataaaaaggtacgcctttttcgccatgctgggtgccatcggcagcatttttgcccgtaccgtcagggattgcctgaatggcgatataaataggtgcgatacctaccagcgccgccaataaaatgtgcaccgttgccggaacgccaaaggccgtcagtgccatcccgacacctgcgcctgccagcgtgcccaggctataaaaaccgtgcatcatcggcaaaaccgtcttattcatttctcgctcaacggcagcaccttcaacgtttatcgccacttccgcagaaccaaaacttgccccaaagacgccgagaccaacggcaaagagcagggggcttgtcagccagagtgccagacttaatatcatcatcccgatcaatgcgcaggacatcgtgaccaggatgacattacgtgtcccaaagcgtttcactaaccacgcgctgcagagaataccgctcatgctaccgatgctcagaccaaagagaacaccgcccatttcagcgatgctgacagagagaatatcgcggatagcaggcgtacgggttgcccaggacgccattaacaggcctggcaaaaagaagaacataaacagcgcccaggttcggcgtttcaatgcattacgactagaatttacggtcatagatcacgtcaaaataagaagagggaagacaacattagcaaggttgtgtacatttgtacacaattgcagagagaggaaatgacatgcgtcgcgctaacgatccgcaacggcgagaaaaaattatccaggccacgctggaggcggtgaaactttacggaatacatgctgttacgcaccgcaaaattgctacccttgccggggtaccgttgggaagcatgacctactattttagtggaattgatgagttgttactggaggcgttcagcagttttactgagatcatgtcccggcaatatcaggcattttttagcgatgttagtgatgctccgggcgcatgccaggctatcaccgatatgatctacagcagtcaggttgcaacgccggataacatggagctgatgtaccagctctacgcgctggctagccgaaaaccgctattaaaaacggtaatgcaaaactggatgcagcgcagtcagcaaacgctcgaacaatggtttgaacccggaaccgcccgcgcgcttgatgcgtttattgaggggatgacgctgcattttgtcaccgaccgtaagccgctaagccgcgaggagattttgaggatggttgagagggttgcagggtaatagataagttttagataacaaaaaacccatcaaccttgaaccgaaatggcggggttgatgggctccacaaaatggggacatcaaagaaaagcagtggcactaattaagactgatgccctgcggaaaagttctgcggttgtgcaaaaaaatttcattttcagggcaacttcagttttatcctaatcctggccataccatgacgatgattgtccctgccagcgtcagcaggacgttggcgattgcataggtgcccgcatagcccagcgccgggatgttactgcgagctgtatcactgatgatctccattgccggcgcgcaggtacgtgcgcccatcattgcgccgaacaacagcgcgcggttcattcgcaatacataagcaccgaacaagaaacagataaccacgggcaccagactgacaatcaatccggcaatcaacatctgaccgccaatcgcgcccaggccgttattaataccgctaccggcgctcagaccaacgcctgccataaacaccatcaagccgaactctttcaccatgcttaatgcaccctgcggaatgtaaccgaaggtcgggtggttagcacgcataaagcccagcataattccggcgaataacaacccggcagcgttccccatgccgaaactgaatgtgctgaactggaaggtgatcatcccgatcatcagcccaataacaaagaaggcgcagaatgccagcaggtcagtgacctggctgtgaatgctgataaagccgatgcgatcggcgatggtttttacgcggcgggcatcgccgctgacttgtaaaacgtcacctttgttaagcacgacgttgtcatctatcggcatctcaatctggctacgaatgacgcggttaaggaagcaaccgtgatcggtcaacttcagttgtgcgagacgtttacctacagcgttatggtttttaacgaccacttcttcagtgacgatacgcatgtcgagaaggtcacgatcgaaaacttctttaccgttacggaagctgggatcgagtcgggcatgggcgtcgggatagcctaccaacgctatttcatcgcccatttgtagcacggcatcaccgtctggatttgccagaatcccgttacgtcgaatacgttcaatgtagcagccggtttgtcgataaatacccagttcacgcagatttttgccgtcggtccaggccaccagttccgggccgacgcgataggcgcggatcaccggtaaataaaccttacggttggcatcagtgtccaggccacgttcgcgggcgatttgctgggcgctggtctgtaagtcctgatgctgcaatttcggcaagtaacgcgcaccaacaatcaaactcaccagaccgattaaataggttaaggcatacccgaggctcagattatccagtgccagactgagctgcctgctttccatgccggaatgacgcagtgtatcgccagcaccgaccagaaccggtgtgctcgtcatagagcctgctaacataccggccgtcaggccaatatcccagccaaacagcttacctaaccctaaggcgatcaccagcgcactgccaaccatcaccagtgctaacattaggtaatttttcccatcgcgaaaaaaaatggaaaaaaagttcggtccggcttcgaccccgacgcagaaaataaacagcataaagccaagattaagcgcatcggtgttaatgctgaaatgttgttggcctaataacaggcttacgactaaaacgccaatggaattacccagttggatgctaccaagtcgtaactttccgagacatagcccaagcgcgaggaccacaaataataacagaatgtaattcccatttaacaattcggcgacgtttatattcacggaggctaacttcttgtttactagtaagctgttgaaagaaatggtaatttacgataatgttttttaccagaattcagggcgcagattcattcagcgcacctaaacgatagtaaagtaacaatatattttactagtgtaatcacattaggtatcaacggctatatgaattgcgttggcctatattagcatggaatgcgaagcggctttatcttactgaacgccacactggcgaaaaatgtgttcgatagacgcagtgtcaggaggaacgagtgaaacataaacaacgttgggcgggggcaatctgctgttttgtcctcttcattgtggtgtgcctttttctggcgacgcacatgaaaggcgcttttcgggctgccgggcatcctgaaatcggcttgctatttttcattcttcctggagcagtcgccagcttctttagtcagcgtagagaagtcctgaaacctctgtttggcgcaatgctggcggcaccctgtagcatgctcattatgcggctgttttttagtccgacgcgcagtttctggcaagagctggcatggttactaagcgcggtgttctggtgtgcgctgggggcactgtgtttcttatttatcagtagtttgtttaaaccacagcacagaaaaaatcagtaaagccctcaacgcgagggcttgtcagacgatcaggcgtccagattttctttcacccatgcagcaaaatcggtatagccgccgatatgttgctgatcgacaaaaatctgcggcacggtttctacgggtttacctgccttttgttgtagatcttctttagtgatcccttccgcacgaatatctacatactgatactgaaaatcatcgcgttcattgctcaatttctcagccagatcttttgcacgcacacagtaagggcaaccgctacgaccaaaaataacggtttgcattatttctctcctcatagatttatgcctgtaatgatcacgctaaaatgtattcgctgaaagtaggtttaacctgttgcattaattgctaaaagctataactgttaaacacaatacagtgaaaagttttagactgaaggctcactttgcagagggaagcgtatgcgcgcgatcggtaaattgcctaaaggcgtgttgatactggaatttatcggaatgatgctactggcggtggcgctgctgagcgtaagcgactccctgagcctgcctgagccattttctcggccagaagtgcagattctgatgatttttctcggtgttttgctcatgcttcccgctgcggtggtggttattcttcaggtggcaaaacgtcttgccccacagctgatgaaccgtccaccgcaatatagtcgtagtgaaagagaaaaagataatgacgccaaccattgaacttatttgtggccatcgctccattcgccatttcactgatgaacccatttccgaagcgcagcgtgaggcgattattaacagcgcccgtgcgacgtccagttccagttttttgcagtgcagtagcattattcgcattaccgacaaagcgttacgtgaagaactggtgacgctgaccggcgggcaaaaacacgtagcgcaagcggcggagttctgggtgttctgtgccgactttaaccgccatttacagatctgtccggatgctcagctcggcctggcggaacaactgttgctcggtgtcgttgatacggcaatgatggcgcagaatgcattaatcgcagcggaaagcctgggattgggcggggtatatatcggcggcctgcgcaataatattgaagcggtgacgaaactgcttaaattaccgcagcatgttctgccgctgtttgggctgtgccttggctggcctgcggataatccggatcttaagccgcgtttaccggcctccattttggtgcatgaaaacagctatcaaccgctggataaaggcgcactggcgcagtatgacgagcaactggcggaatattacctcacccgtggcagcaataatcgccgggatacctggagcgatcatatccgccgaacaatcattaaagaaagccgcccatttattctggattatttgcacaaacagggttgggcgacgcgctaaaaccgccacgtcgatgtatgatacgcgggcttttgaccaggtctgacagagaggtgcagggtgaaaattgccatattgtcccgggatggaacgctctatagctgtaagcggctgcgtgaagccgctatacagcgcggtcacctggttgaaattcttgatccgctttcttgctacatgaacataaatcctgcggcgtcttctattcactacaaaggccgcaagttaccccattttgacgcagtgatcccgcgtattggcaccgccattaccttttatgggacggcggcactgcgccagttcgagatgctggggagctatccgctcaatgagagcgtcgccattgcccgggcgcgtgacaaattgcgttccatgcaactgctggcgcgtcagggcatcgacctgcctgtcacgggcattgcgcatagcccggatgataccagcgatttaatcgacatggtcggtggtgcgccgctggtggtcaagttggttgaaggcacgcagggaattggcgtcgtgctggcggagacgcgtcaggcggcggaaagcgtgattgacgctttccgcggtctgaacgcgcatattctggtgcaggaatatatcaaagaggcgcaagggtgcgatatccgctgtctggttgttggcgatgaagtggtcgctgcgattgaacggcgggcgaaagagggcgattttcgttccaatttgcatcgtggcggcgcggcaagcgtcgccagtatcacaccacaggagcgtgaaatcgcgataaaagccgcgcgaacgatggcgctggacgttgctggtgtggatattctgcgtgctaatcgcgggccgttggtgatggaggtgaatgcgagcccggggctggaaggaatagaaaaaaccaccggtatcgacatcgcgggtaaaatgatccgctggatcgaacgccacgctacgacagaatattgcctgaaaacgggtggttaatcgcaatcacattactgatcatggttttgcctgcgctttttgcgtaagctgtgccggtctttttatcgaaagaggttgtacaaaattatgacaagcctggtcgttcctggtctggatacgctgcgtcaatggctcgatgacctggggatgagtttttttgaatgtgataactgtcaggctctgcatctgccccatatgcagaatttcgacggtgtctttgatgccaaaatcgatctgatcgataacacgatcctgttttctgccatggcggaagtccgacctagtgccgtattgccgctggcggcggatttatctgccatcaatgccagtagcctgaccgtgaaagcatttcttgatatgcaggatgataatctgccaaagctggtggtttgccagtctttatccgttatgcagggcgtaacctatgagcagtttgcatggttcgtgcgtcagagcgaagagcagattagcatggtcattcttgaagctaatgcccatcaactgctgttaccgactgatgatgaagggcaaaacaacgttaccgaaaactatttcctccactgataactcctttcgagcacgcagtcgctggtgcagtggctgcgcgctgcaaaattatctgctgtttttaaccttttcttaaagattatttcacttctcttgtgtcgatttggctttatcacatagagcaaatatgcataaaaatttgttaaataccgttttttaatccgagctatagtctcaaaccctggctaaagttattcttgcgatgcttttatatagcgagcagtgctggccgggagaaagttctcttttcttacaccgcgccgataaaaaatatgcacgtttattgcatatctttcagtgtgacaacttttgttcgtttgttaacgaactttcagaaggaaagagatatgaccgccttaaataaaaaatggctaagcggtctggttgcgggtgctctgatggccgtctctgtcggcacgctcgcggctgaacaaaaaacactccacatttataactggtctgattatatcgccccggacacggtggccaattttgaaaaagaaaccggtattaaagtcgtctacgatgttttcgactctaacgaagtactggaaggcaaattaatggccgggagtaccggctttgatctggtggttccatctgccagctttctggagcgccagttgactgcgggagttttccagccgctggacaaaagcaaattgccggagtggaagaatctcgacccggaactgctgaagctggtcgccaaacacgatcccgacaataaatttgctatgccctatatgtgggcgacgaccgggattggctataacgttgataaagttaaagcggtgctgggcgaaaacgcgcccgtcgatagctgggacttgatcctcaaacctgaaaatctggaaaaactgaaaagctgcggtgtctctttcctggatgcgccagaagaagtttttgctaccgtgttgaattatctcggcaaagatcccaacagcactaaagcggatgattacaccggaccggcaacagatctgctgttaaagctgcgcccgaacattcgttatttccatagttctcaatacattaacgacctggcaaacggcgatatttgcgtcgctatcggctgggcaggtgatgtctggcaggcgagtaaccgcgcgaaggaagcgaagaatggcgtgaatgtcagcttcagcattccaaaagaaggggcgatggcgttctttgatgtattcgccatgcctgcggatgccaaaaacaaagacgaagcctatcagttcctgaattacctgctgcgcccggatgtagtagcgcatatttccgaccatgtgttctatgccaacgccaataaagcagccacgccgctggtgagtgcggaagtccgtgagaacccaggtatttatccgcctgcggatgttcgtgcgaagctgttcactctgaaagtgcaggatccgaaaatcgaccgtgtgcgcacccgcgcgtggaccaaagtgaagagcggaaaataatccgcagtcgtagatgccggaggggcgcaccacacccgccggcaattcgcaccattatggtgcgcttgcacacattcaatgccggagagcagccgtgaatgacgctatccctcgcccgcaggcgaaaacccgtaaggcgctgacgccgctattagaaatccgcaacctgaccaaatcctacgatggtcaacatgcggtggatgatgtcagcctgaccatctacaaaggtgaaatcttcgcgctgctgggcgcatccggctgtggcaagtccacgctgctgcgtatgctggcaggtttcgaacaaccttctgccggacagataatgcttgatggcgtcgatttgagtcaggttccgccttacctgcgccccatcaatatgatgtttcagtcttacgcgctgtttccgcatatgaccgtggaacagaacatcgcttttggcctgaaacaggacaaactaccgaaagcggaaattgccagccgggtcaatgagatgctcggcctggtgcatatgcaggagttcgccaaacgcaaaccgcatcagctttccggtggtcagcgacaacgtgtggccctggcccgaagccttgcgaagcgcccgaaactattactgctcgatgagccgatgggcgcgctggataaaaagctgcgtgacaggatgcagcttgaagtggtggatattctggagcgcgtcggtgtgacttgtgtgatggtcacccacgatcaggaagaggcgatgaccatggcggggcgcatcgccattatgaatcgtgggaaatttgtccagattggcgaaccggaagagatctacgagcatccgactacccgctatagcgccgaatttattggcagcgtaaacgtctttgaaggcgtactcaaagagcgtcaggaagatggcctggtgcttgatagcccggggctggtgcatccactgaaagtcgacgcggatgccagcgtggtcgataacgtgccggtacatgtggcgctgcgcccggaaaaaatcatgctttgcgaagagccgcccgccaatggttgtaacttcgcggtgggggaggtgatacacattgcctatctcggcgatcttagcgtgcatcacgttcgtctgaaaagtgggcagatgattagcgcccagctacaaaacgcccatcgtcatcgtaaagggttaccgacctggggcgacgaagtgcgtttgtgctgggaagtggacagctgtgtggtgctgacggtttaaggagcaaagatgagtacacttgaacctgctgcccagagcaaaccgccgggcggatttaagctgtggttgagccagctgcaaatgaagcatgggcgcaaactggtcattgcgttgccatatatctggttgatcttgctgtttctgctgccatttctgattgtctttaaaataagcctggcggagatggcgcgcgctattccaccttataccgaactgatggagtgggctgacgggcaactgtccatcactcttaatctcggtaattttctgcaactgaccgacgatccgctctatttcgatgcttatctccagagcctacaggtggctgcgattagcacattttgctgtttactgatcggctatccgctggcgtgggcggtggcgcacagtaagcctagcacccgtaatattttattactactggtgatcctgccgagctggaccagctttctgatccgcgtttatgcctggatgggaatattaaaaaacaacggtgtgctgaataattttctgctgtggctgggggttatcgatcaaccgctgaccattctgcataccaatctggccgtttatatcggcattgtttacgcttacgtgccgtttatggtactgccgatttataccgcgttgattcgtattgattatagcctggtggaagcagcgctggatctcggtgcacgaccgctgaaaacgttctttactgtgatcgtgccgctgactaaaggtgggattattgccggaagcatgctggtgtttatcccggctgtgggcgagtttgtgatcccggaactgctcggtggcccggacagcatcatgatcgggcgcgtgctatggcaagagtttttcaataaccgcgactggccggtggccagcgcggtagcgatcatcatgttgctgctgctaattgtgccgataatgtggttccacaaacaccagcaaaaaagcgtgggagaacacggatgaataatttaccggtagttcgtagcccctggcggattgtgattttgctgctgggctttacctttctctacgcgccaatgctgatgctggttatctatagctttaacagcagcaagctggtgacggtgtgggccggctggagtacgcgctggtatggtgagttattgcgcgatgacgcgatgatgagtgcggttggtttaagtctgacaattgcggcctgtgcggcgacggcggcggcgatcctcggaactattgcggcggtggtgctggtgcgctttggcaggtttcgcggaagtaatggctttgcctttatgatcaccgcgccgctggtaatgccagatgtcatcacgggcttgagcctgttgttattattcgtcgcgcttgctcatgccattggctggcctgcggaccgcggtatgctcaccatctggctggcgcatgtcactttttgtacggcttatgtggcggtcgttatttctagtagattgcgggaactggatcgcagcatagaagaagcagcgatggatctcggtgcgacgccgctgaaagtgtttttcgtcattacgctaccgatgatcatgcccgcgatcatttctggctggttactggcttttactttgagccttgatgatctggtgatcgccagctttgtttccgggccgggagccaccacgttaccgatgctggtcttttccagcgtgcggatgggggtgaatccggaaatcaacgccctggcaacattgatcctcggcgcggtcggaattgtcggatttatcgcctggtatctgatggctcgcgcagaaaaacagcggatacgcgacatccagcgtgcaagacgtggctgaagacactaaaatttgccaacctggctacataatgccgcgcatgtcgcggcattgttttcatggaagacgaaacgttgggattttttaagaaaacatctagttctcatgctcgcctgaatgtgcctgcgctggtgcaggtggcggcgctcgccattattatgatccgtggcctcgacgtgctgatgattttcaatacgctgggcgtgcgcggtattggcgagttcattcatcgcagcgtacaaacctggagtttaacgctggtctttttaagcagtctggtgctggttttcattgagatctggtgtgcgtttagtctggtgaaagggcgtcgctgggcgcgctggctatatctgctgacacaaatcaccgccgcaagttacttgtgggcggctagcctggggtacggttatccggagctgttcagcattcccggtgaaagtaaacgtgaaatcttccatagcctgatgctgcagaagctgccggatatgctcatcctgatgctgctgttcgttcccagcaccagtcggcggttcttccagttgcaataatgtgtataatcgtcgcccctgatgatgtgaaggtcaatgtatgcagtgcgcactttacgacgcgggtcgctgtcgttcctgtcagtggataatgcagccgattccagagcaactctccgctaaaaccgccgatcttaaaaatctgctcgccgactttccggttgaggaatggtgcgcgccggtgagtggcccggaacaagggtttcgtaataaagccaaaatggtggtgagtggtagcgttgaaaaaccactgctcggtatgctgcatcgcgatggcacaccagaagacctttgtgactgcccgctttatcctgccagttttgcgcccgtttttgcggcgctaaaaccgtttatcgcccgagcggggttaacgccctacaacgtggcgcgtaagcgtggcgaactgaaatacattctgctgactgaaagccagagtgatggaggcatgatgctgcgctttgtactgcgttctgataccaagctggcgcaactgcgtaaggcgctgccgtggttacacgaacaactaccgcagctgaaagttattaccgtcaatattcagccggtacatatggcgattatggaaggggagacggagatctacctgaccgaacaacaggcactggcggagcgttttaatgacgtaccgctgtggatccgtccgcaaagtttcttccagactaatccggcggtcgccagccagttgtacgccaccgcgcgcgactgggtacgacagctgccggttaaacatatgtgggatctgttctgcggtgtggggggctttggtttacactgcgcgacgcctgacatgcagttaaccgggatcgaaattgcaagtgaggccattgcctgtgcaaagcagagtgccgctgaactgggcttaacgcgtttgcaatttcaggcgctggactccactcagtttgccaccgctcagggggatgtgccggagctggtgctggttaacccgccgcgccgcggcattggtaaaccgctgtgtgattatctcagtacgatggcaccgcgttttatcatctactccagctgtaacgcccaaactatggcgaaagatatccgcgaactgcctgggtttcgtattgaacgggtgcagcttttcgatatgttcccgcataccgcgcactatgaagtgctgacgctgctggtgaagcaataaaaaagccgcatgtgcggcttcagattgctgacaaagtgcgcgttgtttatgccggatgcggcgtaaacgccttatccggcctacaaaagcgtgcaaattcaatacattgcatgggccatgtaggcctgataagcgtagcgcatcaggcaattttacctttgtcatcagtctcaagccgcggttgcggctttctgaatcttactgtgggaaccactggtcactgattttttgataagtaccgtcagctttaattgctgccagcgcgttattcagtttttccagcagggctttgttatccggacgtacagcgatgcccaggccggtgccaaaatattgcggatcggtcactttctcagtagcaacaccaagttgtggattggttttcagccattcgtttaccaccgctgtgtcaccaaataccccatcaatacgaccatttttcagatcgataaaggcattctgataactgtcataagagacagttttcacttccgggtgctgatcctgaatatatttctggtgcgtagtaccgttttccatcccaatacgtttgcctttcagatcggcaaacgttttgtaggtatcttttttggcaatcacgacggcactgttttcatagtagggcgtggtaaagcttacctgtttgctacgctccggggtgatatccataccggagattacggcgtcatattttctgaatttcagggacgggatcaggctgtcgaacgcgtgattagtaaaagtacattctgcctgcatttgtttgcacaaggcttttgccagatcgatatcaaagccgacaatctcattattagcacctatagattcaaagggtggataggtggcactaacgccaaaattgattttctctgcggcagaagcaccgaaagtaaaggaagcaagtaaagcggcaagaactaactttttcatgatggaactcccgtctgtcaatcttatgatttttggccgtgtctgcggcatgggataacaatgccatcaagtgaatttatatgcaataaacatgattaaataatttaaatgaaataaaaaagacggacaacttagtgggttgtccgtcttcattataagaatttatgcactatgtaggccggataaggcgtccccgccgcatccggcacaggcaccgtgctgatgtctgatgcgacgctggcgcgtcttatcagacctacaaaaccccccggcgaatgtacgcagccacattaatttcgccgttcgaatgccagcgctttgcgctcgatcagacgcatcatcagcgtcagcaggccgttaacgaccaggtaaataatccctgccgcaccgaacaccattacatcgtaggtgcgtccgtacaacaactggctgtatcccatcacttccatcagcgtaatggtgtatgccagagaggtacttttgaataccagcaccacttcgttggaataagaagagaggctgcgtttaaaggcatacggcagcaggatcgccagcgtatcttttttgctcattcccagggcgctacaggactgccactgaccttccgggatcgcacgaattgcaccgtaaaacagctgcgtggtatacgccgcactattcaggctcaacgcaatcagcgcacataaccacggttcactcaacaaatgccacagtgccggatactcctgcaaagtcggaaactggcccggcccgtaataaatcaggaagatctgcaccagcagcggcgtaccggtaaacagcgtgatataaccccgcaccagccacaccagcaccggcgttttcagcgtcaggatgatggtaaaaatcaatgccagaatcagtgccacaatcaggctggcaacggttagcgtcaggctggtgtgtagccctttcatcagttcgggtaaatactcaaacattagctgggcctccgctcaaaacgtgtcgcgcgcaggtcaatgcgtttgagaatgtactgactgagcagggtgatcaccaggtaaatcgccgccgccacaatgtaccaggtaaatggttcctgggtacgagtagcgatgctttttgtttgcagcattaaatcattcacactaatcaaactgaccagcgcggtatctttcagcagcaccagccactggttaccgaggccaggcagcgcatgacgccacatctgcggcatcaccagacggaaaaagatagcgcttttgctcagccccagcgcctgaccagactcccactgacccaccggcaccgctttcaacgcgccccgaagcgtttggctggcataggcggcatacagcagactcagagcgatgacaccacaaaggaacgggctaacgtcgaagttctcaatgtccatctgcactgggatctgcacgaacccaagattgatagtgaagccatcgctaagcgtcagcagcagctggctggagccaaaatagataaacagcaccaccagaatttctggcaggccacgcagaatggttaccagcgcactacctgcccacgcgacaggacgccattttgcgctctcccataccgcaaagaacatcgccagcgccagcccgacaatcaatgcacaaacggcaaggccgacggtcatcccggcggcgcttgctaaaggaaaaaattcattcatcaggaattacttctggaaccatttgttgtagatggtttcgtaagtgccatctttcttcactttttccagcgcagtgttgagtttctgctgcagctcagtgttgccctgacgtaccgcgatgccgaggccagtgccgaagtaatctttatcggtcactttgtcgcccaccgccgccagtttcgggttatctttcagccactcagtgaccactgcggtgtcaccgaagacgccgtcgatacgcccgttttgcagatccagttttgcgttctggtagctgtcatacggaacggtagtgatttccgggtgcttatccataatgaatttctggtgtgtcgtcccgttctgtacgccgacttttttgcctttcagctgatcaacactggtgtatttgccttgctgacccacaaacagggcagagttgtcatagtacggggtggtaaacagcacctgcttttcacgctccggagtgatatccatgcccgccatcacggcttctacgcgacggaatttcaggcttgggatcaggctgtcaaacgcctggttagagaaagtgcaggttgcatcaatctctttacacagcgcttgtgccaggtcgacgtcaaaaccaacgatctggttgtttgcatcaatgctttcaaacggaggataggaggcttcggtagcaaaacgaatggtttcggcagctgtggcggaaagactaaaacctgcaattaacgcggcaatcagaacttttttcattgttgttatcccgaatcttagtgagagagatagtttttaaatgcttcggtttgcggctcggtaaagcagctcgcgtcgccttgttctacgatatgaccattttccatatacaccactcggctggcggttttacgcgccacttcaacttcgtgggtgacgatcacctgggtaatattcgtttctgccagctcacgaatgatgctgacgatttgtgccgtaatttccgggtccagtgcggcggtcggttcatcgaacagcagtacctgcggttccatcatcaacgcacgggcaatagcaacacgctgctgctgaccaccagaaagatgcagcgggtaacgatcgctataaggtttgagacgcagacgttccagcagtttttctgcacgggccagcgcctgatctttactcaaccccagtacacggcagggcgcttcaatcaggttttgctgcacggtcagatgcggccacaggttgtattgctgaaacaccatgccaacgttacgacgcaaatcgcgaatcgctttgtcagagggtgttttggtgaaatcgaaatggttgcctgcaatgttgagcgtaccggagcgcggcatctcaagcagattgagtacacgcagcaggctgcttttacccgcgccgctggggccaagtaacaccagcgtttcgccctgtgggcaatccagcgtgatatcgaacagcgcctgatgcgcgccgtagaagcaattaatgccgtttaattgaatactcattgacactcgtatactggcagtctgatagctattgaggtcgaagatagtacctttgacagaataattatgcaatatttctgctttaaaagttaaaagcaaagcgcattattcaataaacatagcacaaaataacgggggcggtggtcggcgagcataaatgtcggcattcctcacgaaatgccggacaatttacggggtttattggttgatcaaggcgttagcgattctcgatggactgacggagcgtacccgccgtggcatgaacgctaccgcctaagtaacgcacatcgtcgatgacccaacactggccttcctgaatcattaacacttcatcctgccaaccctggtcaccctgtttgagatccacgcgcaatggaatgttacgggcatcacgattagggatagtgcttgcactggcaacgtgggcgctatctggcaaggtggttcgactggagaatggatcgttggtcagtagttcccgatggttattatcccgggaggcatcgctaagcagtgtcgccagtttgtcgctcagataagggcgcaaggcggtgatgtcgttgctgcggtgcaaaatgcggtagtcataaaattgctgggccacgttatccgggcctccttcaacgcaaggaccactgcgtgtgccgttatctttataagctggagtgactgtggtgcaggcactgaggagcagtgcgcaggggataagcattgtcaatttgctgtagcgcataatgatttccttataagcgatcgctctgaaagcgttctacgataataatgatatcctttcaataatagcgtatcagtctgataatgcttttgagatcgaaggcttagcaaacaaggagatcgatcatgcaattttctacaaccccaactctggaaggccagaccatcgttgaatattgcggtgtggtgaccggcgaagcgattttaggtgccaatattttccgtgatttctttgccggtatccgcgatatcgttggcggacgttccggtgcgtatgaaaaagaactgcgtaaagcacgggagatcgcctttgaggaattaggctcccaggcgcgggcgctgggggccgatgccgtcgtcggtattgatatcgactacgaaacggtcgggcaaaacggcagtatgctgatggttagcgtcagcggtacggcggtgaaaacgcgtcgatgagaagattcttctggctggtcgctgccgctctgttattggcagggtgtgcaggcgaaaaaggcattgtcgagaaagagggatatcagcttgatacccgacgccaggcgcaggcggcgtatccgcgcattaaagtgctggtgatccactacaccgcagatgattttgatagcagcctggcgacactgaccgataagcaggtcagcagccattatctggtccctgcggtaccaccgcgatacaacggtaaaccgcgcatctggcaactggtgccggaacaagaactggcctggcatgcggggattagcgcctggcgcggggcaacgcgccttaacgacacctctattggcattgagctggaaaaccgtggctggcaaaaaagcgccggagtgaaatattttgccccgtttgaaccggcacagattcaggcgcttattccactggcgaaagatattattgcccgttatcacatcaagccggaaaacgtagtggcacatgcggatatcgcaccgcagcgcaaagacgatccggggccattatttccctggcagcaactggcgcagcaggggattggtgcctggccggatgcgcagcgggttaacttttaccttgccgggcgcgcgccgcacacaccggtagataccgcgagtttgctggagcttttggcgcgctacggttatgacgttaaacctgatatgacaccgcgcgagcagcggcgcgtgattatggcattccagatgcatttccgcccgacgttatataacggcgaagcggatgcagaaactcaggcgattgccgaagcattgctggagaaatacgggcaggattaacgcggcagttttccgtggtcgcgtagccaggcggcagttttctcgataccttcatccagggtgatgaccggctgataacctaactcttcctgcgcacgcgtaatatccagcgtaaagtcaaaattcaacttggagacgccgtagtgggtcagcggcggctcttttgcactcttgcggcctaaacgctccatgctgcgggcgatcatatccagcatcgggtaggggacggaacgaatacgacagtcaatattcaactcgtcgatcagcttctgcacgatgctgcgcagtgtgcgatgctcgccgttggtgatgttgtacacacgcccggaaggtagcttatcgcaggcttcctggcttgccagccacattgcgtgcacggcattttcatagtaggtcatatcgaccagcgcactgccgccatgcggtaacagaatactgccgtagtggtgcatcatatgcgccagacggggaataaagactttatcgtgcggtccgaacagactttgtgggcgcagaatagtaaagcgcgtttgtggattcgcctggctaagcatattgatcacttcttcgctggctgctttgctgcgggcaaactcgttggcgaagcggtgagggcgaaaatcttctttaatatcgcgatggtggtgataatcgaagtacagggagggggaagagatatgaataaagttacgcacaccccaggcgacagcccattcacccaggcggcgagtggcgcgaacgttagccagatcgaaagcctgttgtgtcccccagggactggtaaagctggagcagtgccacagcgtatcaatgcccgcgagcatcactttagcttgactactaaccagctcggtcagatccgccggaacaaactctgcgcccattttttccagcaatttgcccattgcctcgttgcgaccggtcgctcgcacgctgatgcctttctggcataaaaactctaccgcgtttcgacctaagccgctggtggcgccggtaaccagtaccttcatatcaatccactgttgttgagaaaataacgtgcgcattcttccgtgatttcccccatgatgcaatgggaaacatgaaagaataacgcaggttttgtcgattaatctgtgctttgttctgccagtctggcgatttgttttgccattccgcgaaaaataaacagatgcgcggggatcatcaataaccagtaaaacagccccggcataccgtgcggatgccagaaagcgcggacatcgatagtacgatagtcgcctttatcttccaggctaaaacacagtcgtcccagccccggcgctttcatgccaaataacaacgtaagttgtttttccggttcaacgacaatcactttccagctatccaccgcatcgccagtctgtaaatattcgcgctccgggcggcctttcgccagcttatgaccgatcgcgcggtccatcaacgcccgtgtctgccacaaaatattgccaaagaaataacgctctttaccgccgatttggttcactacctgccataaagcagcaaggctggcggacgttttaacggtaaaccccgcctgtttggcaaaataaccgtactccggtcgccagcgggcaaaggcctgagcgtcgtagccccagtcgctggagttgaccagtttttcctcctctttcaacgtgctacgtaccgcgtcatcgaaagcgatcagccgttgtgggatgagtgcacgtagcgcggtatcatccgccagcagatcgtgtttcagcccctgaatcaacgccctggcggtggtgggcggtacggaagtaatcacattgagaaaccacacgctaatccagcgggtggggagggggatggggatcaaccagcggcgcttaccgctcaccgccataaaatgttcaaactgttgctgataactgagcacctctggtccggcggcttcgaagatgcggtgttcgctggccggatgatctaacaacgcaaccagatagtgcagcaagttttccagcgcaatgggcgtggtgcgactacgaacccagcgcggaggcgttaagactggcaggttgtagaccatatcgcgcatgacttcgaacgccgcggaacctgcgccaacgataattccggcccgcagttcggtcacgggtacattcgcttcacgcagaatgtccgccgtagcctgacgagcacgcagatgatcgctctgctcatgtggcggggcctgcaagctactaagaaagattaattgcttaactggtacttcacgtagcgcatcgcggacgttgagagccacctggcgctcctgagcgataaaatcgccgccttcgcccatgctgtgcaccagaaaatagaccgtatcgatatcctgcaacagggccggtaggttatccggccagctgagatcgactttatggcaactgacgtttgccagttgcagctttgcaagcctgtcgacatgacgtgccgccgccaggatctgatgcccttgctggctgagtgtgcgcaccagatgctgaccaatgtagccactggcaccgagaactaaaatgcgttgcggcacgtctctctccttaacgcgccaggaatgcacgccagtgggcggcgacttccgccagttgttcgcggctgacgtcaagatgcgtcaccaggcggacaatcgggctggcgttaatcagcacgtttctcgctttcatgtattcgcctaacgcggcagcattttcttccccgacgcgaacaaacagcatattggtgtcctgacgcatcacatccgcgcctgcttcacgcagctgctccgccatccaggcagcgttgtcgtggtcttcctgcaagcgcgcaacgttatttttcagggcatatatcccggcggcagccagaatgccggactggcgcatcccgccacctgtcattttccgccagcgaatggcacgtttaatgtaatcacgattaccgacgagtaaactaccgactggcgtcccaagacctttgctcaggcaaatggtgaagctatcacaatattgcgtgatctctttcagttcgcagccgtaagccaccacggcattaaagatgcgcgcaccgtcaacatgcagcgccagattgcgctcgcgggtaaattcccatgcttctttcaggtattcccgcggcaacactttgccgttgtgggtgttttccagactgagtaatttggtgcgggcgaaatggatatcgtcgggtttgattttcatcgccactttatccagcggtagcgtgccgtcggcagccgcgtctatgggttgcggttgaatactgcccagcaccgccgcgccaccggcttcaaacagatagttatgcgcggcctgaccgacaatatactcttcgccgcgttcgcagtgactgagcagagcgaccaggttggcctgagtgccggtaggcagaaaaatggcggcttctttaccggaaagctctgctgcgtagtcctgcagagcattaacggtagggtcgtctccgtaaacgtcgtccccaaccggggcggccatcatcgcttcgagcatggcgcggcttggtcgggtaacggtatcactgcgtaaatcaatcatggcatgtccttattatgacgggaaatgccaccctttttaccttagccagtttgttttcgccagttcgatcacttcatcaccgcgtccgctgatgattgcgcgcagcatatacaggctgaaacctttggcctgttcgagtttgatctgcggtggaatggctaactcttctttggcgaccaccacatccaccaacaccggaccgtcgatggagaaggcgcgttgcagggcttcatcaacttcagacgctttttctacacggatacccgtaatgccgcacgcttcggcaatgcgggcaaagtttgtgtcgtgtagttcggtgccgtcagtcaaatagccaccagctttcatctccatcgccacaaagcccagcacgctgttgttaaagacgacaattttcactggcagtttcatctgcactacactgaggaaatcgcccatcaacatgctaaaaccgccatcgccgcacatggcgaccacctgacgttctggctctgtcgcctgcgcacccagcgcctgcggcatggcgttagccatgctaccgtggttaaagctacctaacaggcgacgcttgccgttcatttttagataacgtgccgcccacaccgttggcgtaccaacgtcacaggtgaaaatagcgtcatcggcggcaaaatgactaatttgctgcgccagatattgcgggtgaatggctttctcgctcggtttagctaaatcgtccagccctttgcgggcgtcgcggtaatcttccagcgctttatccagaaacttgcgatcggctttttcttccaccaatggaagcaatgcacgcagagtgctcttgatatcgccgaccagtgccatatccaccttgctgtgagcgccgatgctggctgggttgatatcaatctgaatgattttggcatcggtcgggtagaaggcgcggtagggaaattgcgtgccgagtagcactaacgtgtcggcgttcatcatggtatggaaaccactgctgaagccgattaacccggtcattccaacatcatacggattatcgtattcgacatgttctttaccgcgcagggcatgaacaataggcgctttaattttcccggcaaactcaactaactctttatgcgcccccgcgcagccgctgccacacatcagggcgatattgctggaataacgcagcagttgcgccagtttgcgtaactcttcttcttccggcgtcacgactggttgtggcgcatgataccagtgcatggttgccccttctggcgcaggttttaacgccacgtcgcctggtaacacgacaacgctaacgccacggttaagcaccgctttgcgcatggcaatcgccagtacttgtgggatctgctccgggctggaaaccagctcgcaatagtgactacattcgcggaatagctcttgtgggtgggtttcctggaaatagccgctgccaatttcgctggagggaatatgagcggcaatcgccagtaccggaacgtgattgcggtggcaatcgaacaggccgttgattaagtgcaggttgccggggccgcagcttccggcgcagaccgccagttctccgctaagttgtgcttcagcgccagcggcaaaggccgccacttcttcgtggcgggtggacatccactcgatggtgcccatgcgattaagactgtcactaagaccgttcagagagtcgcctgtgactccccagatgcgtttcacccctgcgctttcgagtgttttggcgatataagctgcaaccgtttgtttcatggttctccatctcctgaatgtgataacggtaacaagtttagttcatctgacggagggggaagggatgggagagaaaggaggcactaacggttaaatagcccgatgaaaggaatatcatcgggcataaggcgattatgcgagaaccaaatccccctgcggatggcaggagcaggccagtacgtaaccttcagcgatttcggcgtcggtcagcgtcattgtgctgctcaccgtatattcaccggaaaccacttttgtcttacagcagccgcaaacacccgcacggcaggcagcgacaaccggaacgttattgctttccagcgcctccagtagcgtggtgccaaccggggcgtaaaattctcgtgccggttgcagtttggtgaatttcagaccgctggtcgccgcttctgctactggggtgaagaatttctctttaaagaaacgcgtcacgccgagcgctttcacttcctgctctacccaatccatatacggagccgggccgcaggtcatcacggtacgactagctaagtcaggtacacctgccagcagttcgcgagtgagacgaccagcgataaagccttcggtaacgttattttctgccaccagcgttaccggatagttacgccactcatcggcgaaaataacatcctgcggcgtacgcacgttgtagatcacccgcacatcggcctctgtggacggttcttcgcaagccagcgacgcatgctcataatcggcgtgacgccgcagcctgccgccagcaacaggaatttatcttctgctttatcgtcgcaggtaaattcccccatcgcgtcgctaagccagagataatcaccgcgttttacatcgcgcgtcagccactgggagccgacaccgtcatcaatccgccgcacggtcagggtgatatattcactcacgcctggcgtggaggaaatggtgtaagcacgcagcgtttccgcactgtttcgcacgctgaccagtgcatattgcccggcgcgatatgggtagtaatcgtggcaaatcagggaaatcgtccacacatccggcgtttcttgcgtaatgtgatgaacctgcatccgccacgggcattgattcgttggcatcgtcatcgacaaactccttacgcgctcaacagttgcttcatgtcttcttcaacagtggtgatagaacgcaggccgaatttctcgttcagcaccgccagcaggtctggtgtcaggaaaccaggtgcagtcgggccggtgacgatatttttcacgcccagagaaagcagcgtcagcagaatgacgatcgctttctgttcaaaccaggagagcaccaggctcagcggcagatcgttgacaccgcagcccagtttctctgccagagtgacagccagaataatcgcactgtaagcatcgttacattgacctgcatctaccagacgcggcagaccttcgatatcgccaaactcaagtttgttaaagcgatatttaccacaggcgagggtcaggatcaggcagtcatccggcacgctggtggcgaaatcggtgaagtagtggcgctcgccgcgtgcgccgtcacagccaccaagcaggaagatatgacgcagtttttcacggctcaccagatcaatcagcgtatcagcagcgccaagcagcgtctggcgaccaaaacccacggtgataaggtgcggaatttcgctgtacgggaagcctgccatctgttgcgcctgggtgataaccgcagagaaatcatcaccgtccagatgacgcacgccaggccagccaacaatgctgcgggtccagatacgatcgtcataagcgcctacggttgggtcgatgatgcagttgctggtcatcacgatggggccagggaaacgagcgaactccacttgctgattctgccagccgctgccgtagttaccgaccagatgcttgaatttacgcagctccgggtagccatgcgcaggcagcatttcgccgtgggtgtagacattaacgcccgtgccttcggtctgttccagcaggttgtagagatctttgagatcgtgaccggaaatcagaatgcatttacccgccgtcgctttgacgttgacctgggttggcgtcgggtgaccgtatttaccggtttcgcctgcatccagaatgctcatcactttgaagttcatctggccgatttccatactacactcaagaagcgcgttcatatcggcaggccaggtccccagccacgccatgattttatggtactgggcataaatatcgttgtcgtattgaccgagaacatgcgcgtgttccatataggccgccgcacctttcaggccatacaggcacagcagacgcaggccgagaatgttttcgccaatcgccgctttatctttgttaggggtaaattctgctgcctgacgttgcagctcgccgagatcgtcgctcaccagttgcaggtcagccatcgggttatcgacgcgcgcgttggcatctacagccaggcattgcgctttcagcgcctcgcgcagggcaatcgcttcacgagcgtagccgacaatacgcggagaatcgaagttaacgttggtcagggtactgaaaaaggcacgtggcgcgaagctgtcaacatcgtggttgatgatgccgtattcacgcgcttttaccgcccaggcagaaagcccttgcagcgccgcgatgagtaaatcctgaaggtcagaagtttccgccgttttaccacacatcccctgcgcgtaactgcagccgtttcctgccggagtacggatagtttgttcacattgcacacaaaacatgatcacaccttttaaagttatatttaatatacatgtttaaggttaagacgcttaacgcggggataaaagggatttttcatgcaactttaagggagattgatttagcgcaattttggcggcagggatctaccgccagagaggtattacgcagagaaaaaggcgatgaggatcggcactaacaggctaagaataaaaccgtgaacaattgccgccgggaccatatccagcccgccagtacgttgaagaacgggcagggtgaaatccatacttgtggcaccgcataagcccagtgcagtagagcggctgcggcgaatcagcccagggatcaacataatagcaatcagttcacgggccagatcattaaaaaacgccgcgctcccgattaccggaccaaaagattcggtcaataaaataccggaaagagaataccagccgaaaccggaggccattgccagcgcggtattgatggggagatcaagaataaaggcgttaattaaaccaccaattaaactactgacaaccaccaccacggcgacaatcattccccggcgattaaggacaatctgctttaaggtcatgccattattgcgcaactgaataccaacgaggaaaagtagcaaaattaacgtgtattcactggcttcggtcgcgtgttgtaagaaagccagtccacttagaccaatggcaaaaccaatcactactacgccgcacagttttaggctctccagcgccatcgcaatacggctcgggagtttttcttgctgatggtggttgcgccacggcaggcctcgctccagccacatcagggcggcaatattacacagtaaaataacggtaatactgacggcagaataatgcagaatcgccaacaggttactggcgaggttatcgagaaacgccagactgatacccataaaaaagagaataaggtaaaccatccagcttaatagctgattaataacttttaacgcagcttgttggcgaagcggaatgaggtaacccacaatcaggggaaccagaatgattaacagcccagaaaacatgaaaacccagtccttgcaaagatgaagtcgaaatgcgcgatgacacactactgaaagcggaaggacgagtaaagttgcaattaaaaggaaatgttatgcataaggagcagtagagtattcgttttcatttaaagatattcttgcgctttaattacaaactgcaccgatgttggtggcgtcaaaatcgccgaggcgttccctgaaggccggggcagcccacatggatgtgggctgagggcgcgttttacagggatgttacctcgcgcccgacccggtagccgtaagggataagtcgagggcaccgcgcagcggcgattttgttcgccagagcccgggggtgcagggggcggcggcgattggccgccccctgcgcgctccttgcgccagtggcaatatgttgcttagctcatgaaaggagcgcaacaagatgatgaatcaacatataacaacatcttaaaaaaaggcctgacattacgccaggccttctgcgttaattaatcacgcttttccagcagggtccggtaaatcagaccaccgataatgccgccgacaattggcaccacccagaagaaccacagttgttctaatgcccagccgccctggaagatagcaaccgcggtgctgcgcgccgggttaacagaagtgttagtcaccggaatactaattaagtgaatcagggttaaggccagaccaatagcgatcggcgcaaaacctgccggcgcgaatttgtcggttgcgccgtggatcaccaacaggaaacctgcactcaataccagttcaactaccagcgcggaaagcatggaataaccgcctggactatgctcgccataaccgttagaagcaaaaccgctggctgccgcgtcaaaacccgttttaccactggcaattaaatacagcagcgccgctgcaacaataccgccgacaacctgggcaattacgtagccaacgacttcttttgccggaaaacgtccgccagcccataaaccaatagtgaccgccgggttaaaatgaccaccagaaatatgaccaacagcaaaggccatcgtcagaacggtcagaccgaacgccaacgccacgccggcaaaaccaatgcctaattccgggaagcctgcggccagtacagcactaccacagccaccaaaaacaagccagaaagtaccaaaacattcagctgctaattttctgaacatatccaccacaattaaaaattgaccctgtgaaaaatatggtcgttttatagggtcgtcgtaaaaaagtgacgacggaaataatgcgcggctattttaaaaacgaaggcgagtcattcaccagataaataaatccagtaaatttgatttagggcaacagcgggttgccccatatagtcatttgtctgattgacagtgtagtgcacgcaaaagatttaatcctttaggcgtaataaaaaataatttatcatgctaattatttgattttgttgtttttgcagacttatcagcaagagggagtataacgcgattattcgctcatttttcagacatttgccatgcttaaatgtgatgtcatcacgtattagcaaggcctttcccgttatactgccagcgtaaaggataagtcacatatttctggaggggatatgattcttgagcgcgttgaaattgtgggttttcgcggtatcaaccgtttgagcttgatgctggaacaaaacaacgtcctgattggggagaacgcgtggggtaaatccagcttgctggacgccttaactctgctgctaagcccagaaagtgatctctaccattttgagcgcgacgatttctggttcccgccgggagatatcaacgggcgagaacatcatctgcatattattttgaccttccgcgaaagcctgccaggccgacatcgggttcgccgttatcggccgctggaagcgtgctggacgccatgcaccgatggctatcaccgtattttttatcgtctggaaggggagagtgcggaagacggcagcgtgatgacactgcgcagttttctcgataaagacggacatccgattgatgtcgaggatattaacgatcaggcacgccatctggtgcgtttaatgccggtgctgcgcttgcgtgatgcccgttttatgcgccgtattcgtaacggcacggtgccaaatgtccctaatgtggaagtcaccgcgcgccagctcgatttcctcgcccgtgagttatccagtcatccgcaaaatctctctgatgggcagattcgtcagggactttccgcaatggtacagctgcttgagcattatttctctgagcagggggccggacaggcgcgatatcgtttaatgcggcggcgagccagcaatgagcaacgaagctggcgctatctggatatcatcaaccggatgattgaccgacctggtgggcgcagctatcgggttattttgctcggcctatttgctactttgttgcaggcaaaaggcacattgcgactggataaagacgcccgtccattgttgctgatcgaagatccagaaacccgtttacaccccattatgcttagtgttgcctggcatctgttgaatcttctgccattgcagcgcattgccaccaccaacagcggtgagttgcttagcttaacgccggtagagcatgtttgccgactggtacgtgagtccagccgcgttgccgcctggcgtctggggccgagtggcttgagtaccgaagatagccgacgcatatcctttcacattcgttttaaccgtccgagtagcctgtttgcacgctgctggttgctggtggaaggggaaacggaaacctgggttatcaatgaactggcgcgtcagtgcggacatcattttgatgccgaagggatcaaggtcattgagtttgcccagtccgggctaaagccactggttaaatttgcccgccgaatggggattgaatggcatgtactggtcgatggcgatgaagcagggaagaaatatgccgctacggtacgcagcctgttgaataacgatcgggaagccgaacgagaacatttaacggcgttaccggcgctggatatggaacattttatgtatcgccagggattttccgatgtgttccaccgcatggcgcaaatcccggaaaatgtaccgatgaatctacgcaaaattatcagcaaagcgatccatcgctcttccaaacccgatcttgccattgaagtggcaatggaggcaggacgtcgtggtgtggactccgtaccgacgctgctgaaaaaaatgttcagtcgcgtgctgtggctggcgcgcggtcgcgcggattaaccgcgaaacatcgtggccatttgtggctgaatagcgtcgagcatctcatagcgccgacggtattcagcccgttttttactggcgatttcggcaatctcttttcgtgctatctgtgctggaaggcggtaatggcgttcagcatcacatacgccgccaacgctttcccagaaagcgttgtaatcagcgtggatcttgccttctttatcgcgataacgcaggctgcggtaaatatgcgtttcattgctgacggcaataatctgctctacctgcaaacgttgggcaaacagacaggccgctttcatcacgaggcgtttgggaaatagcccgtggcaggctttcgtcgcattctggatttcctgatgtggaatttcccattttgcgccttgcagtccgccaataaacatcgttcttttcccctgatattcacacagggtaaacgtgatctctgccagaggaataccttcgctgttgcggaacaggattgtgctgtcaccttctttatccatactgatcatcatggtcagctcaagcgtgaactgctcgccgtttttgccttccagcttcgccagttgcagcccgggggtattcaaatataagctgaattcttccgcgctcatacattcgcggagtaacgcataatggtaacgtaacgcctccagcaattgcttacggctaagattcgccgcaaggtaagggcgatgcagacgcacaggcagtcgcggctggcgcgttaacaatacattgagattaggccagtgggaaagttcgttcatccactcaacgcttaaacgcggcataatcaagctgcgcagcaaaaatttctggcgaaaactacggcgatgccagaatttacccggccgacactgtccacgtgccagactaagaaaaagactcaggctgctgagagattcagatggcgtaaaggtccgttcagttagctggctcatattcatgaaatcaatggttatacatggcgtgcttttcaccattgcgtatcttaaccaaacatcaatagtgtgattactaacgtaaattttagggttttgttgatatttcgttgaagttaatgacccggattggcatatggagtattcagaaaatttatgaaaaagcggaaaaccgtgaagaagcgttacgttattgcgctggtgatagtcatcgccggactgattacgttatggagaattcttaacgcacccgtgccgacttatcagacgctgattgtgcgccccggtgatttacagcaaagcgtgctggcgaccggaaagctggacgcgctgcgtaaggttgatgtgggcgcgcaggtcagcggtcagttgaaaactctgagcgtggcgattggcgataaagtaaaaaaagaccagcttttaggggttattgatcctgaacaggctgaaaaccagattaaggaggtcgaagcaacgctgatggagctacgtgcgcagcggcagcaggcggaagcggagctgaaactggcgcgggtgacgtattcccgtcagcaacgtctggcacaaacgaaggctgttagtcagcaggatctcgacaccgccgcgacggagatggctgtgaaacaggcgcaaattggcaccattgacgcgcaaatcaagcgcaatcaggcttctctcgatacggctaaaaccaatctcgattacactcgcatcgttgccccgatggccggggaagtcacgcaaatcaccactctgcaaggccagacggtgattgccgcacaacaagcaccgaacattctgacgctggcagatatgagcgccatgctggtaaaagcgcaggtttctgaagcggatgtaatccacctgaagccggggcaaaaagcctggtttacggtgcttggcgatccactgacgcgctacgaggggcaaatcaaggatgtactaccgacgccggaaaaggttaacgacgctattttctattacgcccgttttgaagtccccaaccccaatggtttgctgcggctggatatgactgcgcaagtgcatattcagctcaccgatgtgaaaaatgtgctgacgatccctctgagcgcgttaggcgatccggttggcgataatcgttataaagtcaaattgttgcgtaatggtgaaacacgcgagcgtgaagtgacgattggcgcacgtaacgataccgatgttgagattgtcaaagggcttgaagcgggcgatgaagtggtgattggtgaggccaaaccaggagctgcacaatgacgcctttgctcgaattaaaggatattcgtcgcagctatcctgccggtgatgagcaggttgaggtgctgaagggcatcagcctcgatatttatgcgggtgagatggtcgcgattgttggcgctagcggttccggtaaaagcaccctgatgaatattctcggctgtctggataaggccaccagcggcacctatcgcgtcgccggtcaggatgttgccacgctggacgccgatgcgctggcgcaactgcgccgcgagcatttcggctttattttccagcgttaccatttgcttagccatttaaccgccgagcagaacgttgaagtacccgccgtctatgctggtcttgagcggaaacagcgactgcttcgtgcccaggagttgctgcaacggctggggctggaagaccgtacagagtattatccggcacagcttagcggtggtcagcaacagcgcgtcagcatcgcgcgggcattgatgaacggtggtcaggtaattcttgccgatgaaccaaccggcgcactggacagccattctggcgaagaggtgatggcgatcctgcatcagctgcgcgatcgtgggcatacggtgattatcgtcacccacgatccgcaggtcgctgctcaggccgagcgggtgatcgaaattcgcgacggcgaaattgtgcgcaatcctcccgccattgaaaaagtgaatgttactggcgggacggaacctgttgtcaacacggtgtctggctggcggcagtttgtcagcggttttaacgaggcgctgacgatggcatggcgggcgctggcagcgaataaaatgcgtactttactgaccatgctggggattattatcggtattgcgagcgtggtttccattgtcgtggtgggtgacgccgccaaacaaatggtgctggcggatattcgttctattggtacgaatactattgatgtctatcccgggaaagattttggcgatgacgatccgcaatatcagcaggcgctgaagtacgacgacttaatcgccatccaaaaacaaccgtgggtcgccagtgccacacctgccgtcagccaaaacctgcgcctgcgttataacaatgttgatgttgctgccagtgccaatggcgtgagcggcgattattttaatgtctatggcatgaccttcagtgaaggaaacacctttaatcaggagcagctgaacggtcgtgcgcaggtcgtggttctcgacagtaatactcgccgccagcttttcccccataaagcagatgtggttggcgaggtgattctggtcggcaatatgcccgccagagtcattggtgtggcggaagaaaaacagagcatgtttggtagcagtaaagtgctgcgtgtctggctaccttacagcacgatgtccgggcgagttatgggccagagctggcttaactccattactgtcagggtgaaagaaggatttgacagcgccgaggcggaacagcaactcacgcgtttacttagtctgcgccacggaaagaaggatttctttacctggaacatggacggcgtcttgaaaactgttgaaaagaccacacgtactttacaactgtttctgacgctggtggcggtgattagcctggtggtgggcggtattggtgtaatgaatattatgctggtgagtgtgaccgagcggacgcgggaaattggcattcgcatggctgtaggtgcgcgagcaagcgatgttttgcaacagttcctgatcgaagccgtactggtttgcctggtcggtggcgcgttgggaataacactgagtctgttaattgctttcaccttgcagcttttcttacccggctgggagattggttttagtccgttggcgctgctgctggcgtttctctgcagcacggtcaccgggattttatttggctggttacccgcacgaaatgcggcacgactggatccagtagatgctctggcacgagagtaatttttgagataaaaatgccagccgatcgggctggcattttgcctttaggatgtacacaatgagacagaagagttatgcgactgccgcttctacttcgacgggcacaataacactggcgtgattgccttttggcccctggtggacatcaaactgaacggattgtccagcttttagcgttctgtaaccatccatctgaatggtggaataatgagcgaaaatatcttcgccgccgccttcagggcagatgaaaccaaaccctttggcattgttgaaccacttaacagtacccttttccatgcttcgacatccttcgcaaatcttatacaagtaagatggaataaaccggggtcagagagggggctgttcaaaacctcgccaactctagaaatacaatttagagaattagggcgagccgtcaagcatttgacaggggacaaggggcaggtatgaatcaaaaatttgaagcagttaacgctattgacaggaatgtgacagatgtcgctgatgccaacgatagatgatagttatctatcatgtggagtagattggtcaggcaaataagctcttgtcagcggcagggcgttctgccgataaccgtaaccgaagatgataactgacaatgggtaaaacgaacgactggctggactttgatcaactggcggaagaaaaagttcgcgacgcgctaaaaccgccatctatgtataaagtgatattagtcaatgatgattacactccgatggagtttgttattgacgtgttacaaaaattcttttcttatgatgtagaacgtgcaacgcaattgatgctcgctgttcactaccaggggaaggccatttgcggagtctttaccgccgaggttgcagaaaccaaagtggcgatggtgaacaagtacgcgagggagaatgagcatccattgctgtgtacgctagaaaaagcctgaatgcaggcataaaaattgggggaggtgcctatgctcaatcaagaactggaactcagtttaaatatggctttcgccagagcgcgcgagcaccgtcatgagtttatgaccgtcgagcacttgttactggcgctgctcagtaacccatctgcccgggaggcgctggaagcgtgttctgtggatttggttgcgctccgtcaggaactggaagcctttattgaacaaaccacacccgttctgcctgccagtgaagaggagcgcgacacacagccgacgctgagttttcagcgtgtactgcaacgtgcggtcttccatgtccagtcctccggtcgcaatgaggttaccggtgcaaacgttctggtcgctatctttagcgaacaggagagccaggcggcatatctgttgcgtaaacatgaagtcagccgtctcgatgtggtgaactttatctctcatggcacgcgtaaagacgagccgacacagtcttctgatcctggcagccagccaaacagcgaagaacaagctggtggggaggaacgtatggagaatttcacgacgaacctgaatcagcttgcgcgcgtgggcggaatcgacccactgattggtcgtgagaaggagctggagcgtgctattcaggttctctgccgtcgccgtaaaaacaacccgctgctggtgggggaatctggtgtcggtaaaaccgcgattgcggaaggtcttgcctggcgaattgttcagggcgatgtgccggaagtgatggctgactgtacgatttactctctcgatatcggttctctgttagcgggcacaaaatatcgcggcgactttgaaaaacgttttaaagcgttgctcaagcagctggagcaggacactaacagcatcctgtttattgatgagatccacaccattatcggtgcgggtgcagcgtctggtggtcaggtcgatgcggctaacctaatcaaaccgttgctctccagcggtaaaattcgtgtaattggtagcacaacctatcaggagttcagcaacattttcgagaaagaccgtgctctggcgcgtcgcttccagaaaattgatattactgaaccgagcatcgaagaaactgttcaaatcatcaatggcctgaaaccgaagtatgaagcgcaccacgacgtgcgttataccgcaaaagcggtgcgtgcggcggtagagctggcggtgaaatacattaacgatcgtcatctgccggataaagccattgatgttatcgacgaagcgggcgctcgcgcacgcctgatgccggtaagcaaacgcaagaaaaccgttaatgtggcggatattgagtccgtggtggcccgtattgcacgcattccagagaagagtgtttctcagagtgatcgtgataccctgaaaaacctcggcgatcgcttgaaaatgctggtcttcggtcaggataaagccattgaggcgctgactgaagccattaagatggcgcgtgcaggtttaggtcacgaacataaaccggttggtagcttcctgtttgccggccctaccggggtcgggaaaacagaggtgacggtacagcttagcaaagctttgggcattgagcttctgcgctttgatatgtccgagtatatggaacgccataccgtcagccgtcttattggtgcgcctccgggatacgttggttttgatcagggcggtttgctgactgatgcggtcatcaagcatccacatgcggtgctgctgctggacgaaatcgagaaagcgcacccggacgtgttcaatattctgttgcaggtgatggataacggtacgctgaccgataacaacggacgcaaagcagacttccgtaacgtggtgctggtgatgaccaccaacgccggggtacgggaaactgagcgcaaatccattggtcttatccaccaggataacagcaccgatgcgatggaagagatcaagaagatctttacaccggaattccgtaaccgtctcgacaacattatctggtttgatcatctgagtaccgacgtgatccatcaggtggtggataaattcatcgtcgagttgcaggttcagctggatcagaaaggtgtttctctggaagtgagccaggaagcgcgtaactggctggccgagaaaggttacgaccgggcaatgggcgctcgtccgatggcgcgtgtcatccaggacaacctgaaaaaaccgctcgccaacgaactgctgtttggtagcctggtggacggcggtcaggtcaccgtcgcgctggataaagagaaaaatgagctgacttacggattccagagtgcacaaaagcacaaggcggaagcagcgcattaatctgattgttaggtaggttggtcaagtccgtaatctcgaaagaggttacggactttttgtttatggggtggaggaggttcagaccctttttttaatgatgatggtaagttgttgataattagtgctgcgggaaggtaaggataaaaaagggtgctgcaggagaatgggatggttttgctttattaacaacgggctaaacgtgtagtatttgagttcactgccgtacaggcagcttagaaattcacaggtaacatactccacccgcccaccatgttcactgccgtacagacagataaaatgcgaaaaaaaagctcgcactttcgtacgagctcttctttaaatatggcggtgagggggggattcgaacccccgatacgttgccgtatacacactttccaggcgtgctccttcagccactcggacacctcaccaaattgttttgctaccaaacctcatgggtggcaacggggcgctactatagggagttggagtaaaacggtcaagaagaattttaatgataattattgtttgctcatactgtaaacaagttgtgcagtatatctacatcgagacaagttacggacttatacttccaaagtacttcatacatatcacaaaataaaaaggccggttaaaccgaccttttactcgttctttctcttcgcccatcaggcggtaaaacaatcagcgactacggaagacaatgcggcctttgctcaggtcgtacggggtcagttcaacagtcactttgtcgcccgtcaggatgcggatgtagtttttgcgcattttaccggagatgtgtgcagtaaccacgtgaccgttttctaactctacgcggaacatggtattaggcaacgtttcaagaacggtaccttgcatttcaatattgtcttctttggccatctaatcctctggggtatcactaccgtaatttgaaccggcaagataatgccgaagttctgtaaataagtaaagatttgcgcgctaaatcgcaacaaacaggttcggcacattactccgaaaacacacggctaagccgcaccaaaagcgcaacgtataagggagcggtgagataaacgatgggcgttacctgacgcgaaaaattccttatcggcagcggggtaatgagcgtaaccaactctgcgaccgcaattataacactctggggagaaatgtgccgaaaacattcattcttgtggactaaacaagcatcgtggtacccagaaattattcggcaatcgtccgaggcgcatttgattgagataattaaggtaatcccggcggggaatttcgcaggcaccaaggcttgctgtgtgatcgttaaggacctggcagtcgataagcttaccgccatgaccgataaattcctcacagaataccagaagcgccgttttagacgcattttccatccggctgaacatggactcgccacaaaatagcgttccctgggccacgccgtacataccgccgacaagctcatcttcacgccagacttcaatggagtgggcatggccgagttcgtgaaggcgatggtaggcttcgatcacgccacgcgtgatccaggttccttcttcgcgatcgctggcacagccttcaatgacctgaccaaaagcgtaattcatcgtgacacgataggggctgcgtttatgaaatcgcttcatactacggctgatatgcagactttctggccatagcaccgcgcggggatcggggctccaccagaggatggggtcgcctggagaaaaccacggaaaaataccacgctggtaagccattaacaggcgcgcagggctaagatcgcccccaagtgccagcaggccgttaggctcacgtaatgcgccttccggggaagggaaggctatactatggcgagaaagctgaaccaggcgcatgaccgcaaaactccacgcaagtcggatcgttcaataatagcttacaaaccctgcttgaactggtaataacgcccctgtctggcaagcagttctgcgtgagtaccttgctcaataatttgcccgttgtccatcactattatttgttggaaacgagagagtccgcgaagtcgatgggtgaccattaacaccgttttctcacgcatcatttctgcaagcaattcaaggatctggctttcggttgtggcatctaagccttcggtaggttcatccagcaacaccagtggcgcatcatgtaacagcgcacgggcgatagccagacggcgcagttcaccaccggagagctggcgtccgccttcacctaaccaactgttgagacctgcatcctcgagcagcttttccaggccaacgcgacgcaagatctcgctcagagcctcatcactactgccagggctggcgagtaaaagattatcacgcagcgtggcgctaaacagatgcactcgctgaggaacaacgctgatggtctgtcgtagagccgcttcattcaggctggctatggggctatcgttaagcaaaatctcgccctgttgcgggtcccatgcgcgggtcagctgttgtaacagtgtacttttgccgcatccggttcgcccgagaatcgctatatgttccccggcgtttacctgaagagaaatccctttaagtgcctgttgagattgctccggataagtgaactgaacatcccgtaacgtcaggctaacgcgatcggcaacacgagtttgggtatcaggaaaggtgacctccggtttttgatccgttaagtcagagatacgtacggcagaggcaatgacttgccccagatgctgaaatgcacccgttactggtgccagtgcttcaaacgcggctaacgcgcagaagacaaacagggcaattaacgcgccgggttgagcattgccgccaacgccgccagacgccatccacagcatcaggatcaccgctaacgcgccaatgagcagcattatcgcttggctcaatgcggtcagttcagattgacggcgttgcgcttccagccattgaatttctgtattctctagttgcgtgcgataacgatcgctggcaccaaaaatggtcagctcagcttgcccttgcagccaggccgtcagttgttggcgatactgtccgcgaagatgagtcagattttgcccggtgctttttcccgcacgataaaacagcggtggcatcaggaaaagcgtcagtaacataatgccgcccagcgtaaaggcgagggtgaaatcaaggaaacttaacccgattgtcaccaccataatcaccacaaaagcgcccaccagcgggctgataacgcgcaggtaaagatgatcgagcgtatcaacatccgccaccacgcgattgagcaattcgccctgacgatagcgcgccagtccggcaggggagaggggcagcaatttgctgaaggtgtaaatgcgcagatgctgcaacacgcggaaagtcgcgtcgtgacttaccagacgttcaaaatagcgcccggcagtacgggtgattgctgcgccacgcacgcccgcagcgggtagcatatagttgaagctgtacagtccggcaacccccgcaaccgcactggcgctgaggaaccagccggaaagtgtcaacagaccgatactggcgagcagcgtcacaattgccagcacaataccaagacttaacatccatttatgacgtttatacagtgccagatagggtagcaaagcgcgcatttaaatctcctcctgacgatgggccagtaatgtggcgaatgggccaccagccacacttaattccgcgtaacgtccttgctcaataatccggccatcctgcataacccaaatgacatcccagtcagcaagatcttctaactggtgggtgaccattaacgttgtctggcgcagagaggcggcattcagcgcctccattacgcgctgttcactgtgagcatcaaggctggcagcgggttcatccaacagtaataggctacagggatttagtaacgcacgggccaccgccacgcgctgcgcctgccccacggaaaggcgggcagcctggtcgccaacaggcgtatcaacgccttgtgggaggagcggtagaaactcgctgacccaggcgttatccagcgctgcttgtaattcttgttcgctggcatcaggtcgcgccagtagtacgttatcccgcaatgttgctgccggtaattgtgggttttgcccaacccaggagagatgtttacgccaactttctggacttaaatcgcgtaattctatcccgttgattcgtaggcttccctgataactgagaaaaccagaaagcgcgttcagcagactgcttttaccactaccgctgcgaccaaccaacaccgcacgttggcctgctggcaaagtaaagttcagcggtccggccagcgttttaccttccgggctcgtgataaacagctcctcggcctcaatggtcaccggatcggtgcttgctaattccgcctcaccacgttgcggatgggcgagcggggtttccataaacgttttcagactgtcagctgcgccaacagcctgggctttagcatgataaaacgtaccgagatcgcgtaatggctggaaaaactctggcgcaaggatcagggccagaaaacccgcagccagcgtcacaccggtatcgtagtgaccaaaatccagctcgccgagataggaaaaaccaaagtagaccgccaccagagcaatactcaggctggtaaaaaattcgagaatgccggaggataaaaacgccagccgtagcacttccattgtccgttggcggaaatcttcgctagcagaacgaatactttcaatttcagcttcaccacgaccaaaaatacgcaatgtttccatgccgcgcaggcgatcgaggaaatgcccacttaagcgagcaagagcgagaaagttacgtcggttagcatcggcagcccccattccaaccagcgccataaacaacggaattaacggtgcagtgcccagcagaatgagcgccgcagcccagttagaggggaagattgccaccacaatcagcaacggcacgctcactgccagcgccatttgcggcagatagcgtgcatagtaatcatgcatatcgtcaatttgctcgagtaccagcgtcgcccagctccccgcaggtttaccctgaatccacgctggccctgcttgttgcagacggtcgagaacctgacggcggatggcaaagcggatatgctgcccggcgtgataacccacccgttcgcgtaaccagaccacccatgcgcgcagtacaaaggtcagaaccagtaacgtaaagggaagcagcagggcttcacggggaatattctccataatcatatgttgcagaattcgcgccatgaaccaggcctgggcaatgatcaatatgccgctcacaaagcccagcagacgagaaatattcagccaacgttgggagatgacgctttgctgttttaaccagcgggttaactctttttgacgagatttattcattgcacgcttagcaggtgagttatcagaattatttgcagagcaatgttacaacggggaaaaaataaaggcgacccatagtcgcatggtgtcgccttctttacttttgttactgatttgtaaaattattttgcgtcagctaaaccatcgaggtagcgttccgcatcaagtgctgccatgcagcctgtaccggcgctagtaatggcctggcgataaatgtgatccatcacgtcgcctgcggcaaagacgccaggaatgctggtctgggtggcattaccatgaataccgctctgtactttgatgtagccgttttccagttccagctgcccttcgaaaatcgcagtattcgggctgtgaccgatagcaacaaacagaccggcaacgtcgagactctcgatgttatcgctgttttgcgtatcgcgcagacgaacgccagtgacacccatttgatcgccggtcacttcttccagcgtacggttggtgtgcagaatgatgttgccgttctccactttatccatcaggcgcttaatgaggattttttccgcgcggaaaccgtcacggcggtgaatcagatgcacttcgctagcgatgttagacagatacagcgcctcttcaaccgcggtattgccgccgccgatgaccgcaactttctggttgcgatagaagaaaccgtcgcaggttgcacaagcagaaaccccacggcctttaaaggcttcttcagagggcaggccgagatagcgtgcagaagctccggtggcaataatcagcgcgtcgcaagtgtattcgccgttatcgccattcagacggaacggacggttttgcagatccaccttgttgatatgatcaaaaatgatctcagtttcaaacttggtggcatgttcgtgcatgcgctccattaataacggaccggtcagatcgtttggatcgccaggccagttttccacttccgtggtggtggtcagttggccgcctttttccatgccggtaatcagcacaggttgcaggttggcgcgcgccgcgtagacagcagcggtgtatcccgccgggccactacccaggataagcagtttactgtgtttggtcgtgcccatgagatccccatagttgttggcagacaatgggcaggattgtagggaatttacagacgtaaaaaaagagtatgacgattttgttaacaatttgtgcaatcggcagcatcgataagcaggtcaaattctcccgtcattatcacctctgctacttaaatttcccgctttataagccgattaaatgatgaataaacgcccctgttaatgaatatctggcatgttgtactaaaaatcgatgttttgctttgacaatcccctggtgttttgcgaaaacattcgaggaagaaaaaaaacagtattcttatatgcgcataaccatgcatgtaaataccatgtttaccgtgctagtgaaatctacgtatggcgtggacagacgccattcgtgatgtcgatagctgccacaaggcaacggtcttctcaccgtagacccaggcattgcgcgccgtgaatcttcatgatttcggtctatcgtgacgggtagcgactctgaacagtgatgtttcagggtcagacaggagtagggaaggaatacagagagacaataataatggtagatagcaagaagcgccctggcaaagatctcgaccgtatcgatcgtaacattcttaatgagttgcaaaaggatgggcgtatttctaacgtcgagctttctaaacgtgtgggactttccccaacgccgtgccttgagcgtgtgcgtcggctggaaagacaagggtttattcagggctatacggcgctgcttaacccccattatctggatgcaagtcttctggtattcgttgagattactctgaatcgtggcgcaccggatgtgtttgaacaattcaataccgctgtacaaaaacttgaagaaattcaggagtgtcatttagtatccggtgatttcgactacctgttgaaaacacgcgtgccggatatgagtgcctaccgtaagttgctgggggaaaccctgctgcgtctgcctggcgtcaatgacacacggacatacgttgttatggaagaagtcaagcagagtaatcgtctggttattaagacgcgctaacacggaacaggtgcaaaatcggcgtattttgattacactcctgttaatccatacagcaacagtactggggtaacctggtactgttgtccgttttagcatcgggcaggaaaagcctgtaacctggagagcctttcttgagccaggaatacattgaagacaaagaagtcacattgacaaagttaagtagcggccgccgccttctggaggcgttgctgatccttattgtcctgtttgccgtctggttgatggctgccttactaagctttaaccctagcgaccccagctggagccaaacggcctggcatgaacctatccataatttaggtgggatgcccggtgcgtggttggcagatacgctgttctttatttttggcgtgatggcttacaccattcccgtcattattgtcggcggttgttggtttgcctggcgtcatcagtccagcgacgaatacattgattattttgccgttagcctacgcatcattggcgttttggcgctcatccttacctcctgtggtctggcggcaatcaacgctgacgatatctggtattttgcctccggtggcgtcattggcagcttactaagcactacgctacaaccactgctacacagtagcgggggaactattgcgctgctctgcgtttgggcagcgggcctgacgttgttcaccggttggagttgggtgaccattgctgaaaaactcggcggctggattttaaacattctcaccttcgccagtaatcgtacccgtcgcgatgatacctgggtcgatgaagatgagtatgaagacgacgaagagtatgaagatgaaaatcacggcaaacagcatgaaagtcgccgtgcccgtattcttcgcggcgcgctagcgcgtcgtaaacggttggcggaaaaattcattaatccgatggggcggcaaacagacgctgcgttgttctccggtaagcggatggatgatgacgaagagattacctacactgcacgcggtgtggctgccgacccggacgacgtcctatttagcggcaatcgtgcaacgcagccagaatatgacgaatacgatccattattaaacggtgcgccaattaccgaacctgtcgctgtagcagctgctgctaccacggcgacacaaagctgggctgcgccggttgaacctgtgactcagacgccgcctgttgcctctgttgatgttccacctgcgcaacctacagtagcctggcagcctgtaccgggtccacaaacgggagagccggttattgctcctgcaccggaaggttacccacagcagagtcaatatgcgcagcctgcagtgcaatataatgagccgctgcaacaaccagtacagccgcagcagccgtattatgcacctgcagctgaacaacctgcgcaacagccgtattatgcccctgcgccagaacaaccggtggcaggtaacgcctggcaagccgaagagcagcaatccacttttgctccacagtctacataccagactgagcaaacttatcagcagccagccgctcaggagccgttgtaccaacagccgcaacccgttgaacagcagcctgttgtggagcctgaacccgttgtagaagagacaaaacccgcgcgtccgccgctttactactttgaagaagttgaagagaagcgagcccgtgaacgtgaacaacttgcggcctggtatcaaccgattccagaaccggttaaagaaccagaaccgatcaaatctagcctgaaagcaccttctgttgcagcagtacctccagtagaagccgctgccgctgtttccccgctggcatctggcgtgaaaaaagcgacactggcgacgggggctgccgcaaccgttgccgcgccagtcttcagtctggcaaatagcggtggaccgcgtcctcaggtcaaagaggggattggtccgcagttgccacgaccgaaacgtatccgcgtgccaactcgtcgtgaactggcgtcttacggtattaagctgcccagtcagcgtgcggcggaagaaaaagcccgtgaagcccagcgcaatcagtacgattctggcgatcagtacaacgatgatgaaatcgatgcgatgcagcaggatgaactggcacgtcagttcgcccagacacagcagcaacgctatggcgaacagtatcaacatgatgtgcccgtaaacgcagaagatgcagatgctgcggcagaggctgaactggctcgtcagtttgcgcaaactcaacaacaacgttattccggcgaacaaccggctggggcgaatccgttcagcctggatgattttgaatttagcccaatgaaagcgttgctggatgatggtccacacgaaccgttgtttacgccaattgttgaacctgtacagcagccgcaacaaccggttgcaccgcagcagcaatatcagcagccgcaacaaccagttccgccgcagccgcagtatcagcagccacaacagccggttgcgccgcagccacaatatcagcagccgcaacaaccggttgcgccacagcagcaatatcagcagccgcaacaaccggttgcgccgcagcagcagtatcagcagccacaacagccagttgcgccacaaccgcaggataccctgcttcatccgctgttgatgcgtaatggcgacagccgtccgttgcataaaccgacgacgccgctgccttctctggatttgctgacaccgccgccgagcgaagtggagccggtagatacctttgcgcttgaacaaatggctcgcctggtggaagcgcgtctggctgatttccgtattaaagccgatgtcgtcaattactctccggggccggttatcactcgctttgaattgaacctggcaccgggcgtaaaagcggcgcgcatttctaacttgagtcgggaccttgcccgtagtcttagcacggtggcggtgcgtgtcgttgaagttattcctggcaaaccctatgtaggtctggagttaccgaataaaaaacgacaaaccgtttatctgcgcgaagttttggataacgccaaattccgcgataatccgagcccattaaccgtggtgctgggtaaagatatcgccggtgagccggtggttgccgatctggcgaaaatgccgcacttgttggttgcggggactaccggttccggtaaatctgtcggtgtgaacgcgatgatcctgagcatgctttataaagcacagccagaagatgtgcgtttcatcatgatcgacccgaaaatgctggagcttagcgtttatgaaggcattccgcatctgttaacggaagtcgttactgatatgaaagatgccgccaacgcgctgcgctggtgtgttaacgagatggagcgtcggtataaactgatgtctgcgctgggtgtgcgtaatctggcgggttataacgaaaaaattgctgaagccgatcgcatgatgcgtccgattccagacccgtactggaagccgggtgacagtatggatgcccagcatccggtgctgaaaaaagaaccatacattgtggtgttggttgacgaatttgccgacctgatgatgacggtaggtaaaaaagtggaagagctgatagcacgtctggcgcaaaaagcccgtgccgcgggtatccacctcgtactggcaactcagcgtccaagcgttgatgttattactggtctgattaaagcgaatattccgacccgtatcgcctttaccgtatccagtaagattgacagtcgtaccattcttgatcaggctggcgcggaaagtctgctgggtatgggggatatgctctactctgggccgaactccacgttgccggtacgtgtccatggtgcttttgttcgcgatcaggaagttcatgccgtggtgcaggactggaaagcgcgtggtcgcccacagtatgttgatggcatcacctccgacagcgaaagcgaaggtggtgcgggtggtttcgatggcgctgaagaactggatccgttgttcgatcaggcggtgcagtttgtcactgaaaaacgcaaagcgagtatttctggcgtacagcgtcagttccgcattggttataaccgtgcagcgcgtattatcgaacagatggaagcgcaggggattgtcagcgaacaggggcacaacggtaatcgtgaagtgctggccccaccgccgtttgactaactaatgcatcgtatgccggataaggcgcggtagcgtcgcatccggcactctatcaactgaaaattcagtattttcttctttcctcaagctgattattagcctggaatagagagtagagggaactcccgatcgggagtgacgtaatttgaggaataatgatgaaaaaaattgccatcacctgtgcattactcagtagcttagtagcaagcagcgtttgggctgatgccgcaagcgatctgaaaagccgcctggataaagtcagcagcttccacgccagcttcacacaaaaagtgactgacggtagcggcgcggcggtgcaggaaggtcagggcgatctgtgggtgaaacgtccaaacttattcaactggcatatgacacaacctgatgaaagcattctggtttctgacggtaaaacactgtggttctataacccgttcgttgagcaagctacggcaacctggctgaaagatgccaccggtaatacgccgtttatgctgattgcccgcaaccagtccagcgactggcagcagtacaatatcaaacagaatggcgatgactttgtcctgacgccgaaagccagcaatggcaatctgaagcagttcaccattaacgtgggacgtgatggcacaatccatcagtttagcgcggtggagcaggacgatcagcgcagcagttatcaactgaaatcccagcaaaatggggctgtggatgcagcgaaatttaccttcaccccgccgcaaggcgtcacggtagatgatcaacgtaagtaaaggcacctgagtgagcaatctgagcctcgattttagcgataatacttttcaacctctggccgcgcgtatgcggccagaaaatttagcacagtatatcggccagcaacatttgctggctgcggggaagccgttgccgcgcgctatcgaagccgggcatttacattctatgatcctctgggggccgccgggtaccggcaaaacaactctcgctgaagtgattgcccgctatgcgaacgctgatgtggaacgtatttctgccgtcacctctggcgtgaaagagattcgcgaggcgatcgagcgcgcccggcaaaaccgcaatgcaggtcgccgcactattctttttgttgacgaagttcaccgtttcaacaaaagccagcaggatgcatttctgccacatattgaagacggcaccatcacttttattggcgcaaccactgaaaacccgagctttgagcttaatagcgcactgctttcccgtgcccgtgtctatctgttgaaatccctgagtacagaggatattgagcaagtactaactcaggcgatggaagacaaaacccgtggctatggtggtcaggatattgttctgccagatgaaacacgacgcgccattgctgaactggtgaatggcgacgcgcgccgggcgttaaatacgctggaaatgatggcggatatggccgaagtcgatgatagcggtaagcgggtcctgaagcctgaattactgaccgaaatcgccggtgaacgtagcgcccgctttgataacaaaggcgatcgcttttacgatctgatttccgcactgcataagagcgtacgtggtagcgcacccgatgcggcgctgtactggtatgcgcgaattattaccgctggtggcgatccgttatatgtcgcgcgtcgctgtctggcgattgcgtctgaagacgtcggtaatgccgatccacgggcgatgcaggtggcaattgcggcctgggattgctttactcgcgttggcccggcggaaggtgaacgcgccattgctcaggcgattgtttacctggcctgcgcgccaaaaagcaacgctgtctacactgcgtttaaagccgcgctggccgatgctcgcgaacgcccggattatgacgtgccggttcatttgcgtaatgcgccgacgaaattaatgaaggaaatgggctacgggcaggaatatcgttacgctcatgatgaagcaaacgcttatgctgccggtgaggtttacttcccgccggaaatagcacaaacacgctattatttcccgacaaacaggggccttgaaggcaagattggcgaaaagctcgcctggctggctgaacaggatcaaaatagccccataaaacgctaccgttaatgttatcgttgcggtaatgttgttactgtatccctgtggtcgcaggctgtggccacatctcccatttaattcgataagcacaggataagcatgctcgatcccaatctgctgcgtaatgagccagacgcagtcgctgaaaaactggcacgccggggctttaagctggatgtagataagctgggcgctcttgaagagcgtcgtaaagtattgcaggtcaaaacggaaaacctgcaagcggagcgtaactcccgaagcaaatccattggccaggcgaaagcgcgcggggaagatatcgagcctttacgtctggaagtgaacaaactgggcgaagagctggatgcagcaaaagccgagctggatgctttacaggctgaaattcgcgatatcgcgctgaccatccctaacctgcctgcagatgaagtgccggtaggtaaagacgaaaatgacaacgttgaagtcagccgctggggtaccccgcgtgagtttgactttgaagttcgtgaccacgtgacgctgggtgaaatgcactctggcctcgactttgcagctgcagttaagctgactggttcccgctttgtggtaatgaaagggcagattgctcgcatgcaccgcgcactgagccagtttatgctggatctgcataccgaacagcatggctacagtgagaactatgttccgtacctggttaaccaggacacgctgtacggtacgggtcaactgccgaaatttgctggcgatctgttccatactcgtccgctggaagaagaagcagacaccagtaactatgcgctgatcccaacggcagaagttccgctgactaacctggtgcgcggtgaaatcatcgatgaagatgatctgccaattaagatgaccgcccacaccccatgcttccgttctgaagccggtagttatggtcgtgacacccgtggtctgatccgtatgcaccagttcgacaaagttgaaatggtgcagatcgtgcgcccagaagacagtatggcggcgctggaagagatgactggtcatgcagaaaaagtcctgcagttgctgggcctgccgtaccgtaaaatcatcctttgcactggcgacatgggctttggcgcttgcaaaacttacgacctggaagtatggatcccggcacagaacacctaccgtgagatctcttcctgctccaacgtttgggatttccaggcacgtcgtatgcaggcacgttgccgcagcaagagcgacaagaaaacccgtctggttcataccctgaacggttctggtctggctgttggtcgtacgctggttgcagtaatggaaaactatcagcaggctgatggtcgtattgaagtaccagaagttctgcgtccgtatatgaacggactggaatatattggctaatacccaatttttctgaatctaaaaagcgcctgcgggcgctttttttgtctccctttgataccgaacaataattactcctcacttacacgtaatactactttcgagtgaaaatctacctatctctttgattttcaaattattcgatgtatacaagcctatatagcgaactgctatagaaataattacacaatacggtttgttactggaatcaatcgtgagcaagcttgagtgagccattatgaaaacgaaaatccctgatgcggtattggctgctgaggtgagtcgccgtggtttggtaaaaacgacagcgatcggcggcctggcaatggccagcagcgcattaacattaccttttagtcggattgcgcacgctgtcgatagcgccattccaacaaaaagtgacgaaaaggttatctggagcgcctgtacagttaactgtggtagtcgctgcccgctacgtatgcacgtcgtggacggtgaaatcaaatatgtcgaaacggacaataccggcgatgacaattacgacggcctgcaccaggttcgcgcctgcctgcgtgggcgttccatgcgtcgccgtgtctacaatccggaccgcctgaaatatccgatgaaacgagtcggggcgcgcggtgaaggcaaattcgagcgcattagctgggaagaagcctacgacatcatcgcgaccaatatgcagcgcctgatcaaagagtacggcaacgagtctatctatctgaactatggcaccggtacgctgggcggcaccatgacccgctcctggccgccgggaaataccctggtcgcgcggctgatgaactgctgcggcggctatctgaaccattacggcgactactcctccgcgcaaattgcggaaggtttgaactatacctacggcggctgggcagatggcaacagcccgagcgatatcgaaaacagtaagctggtagtgctgtttggtaataaccctggcgaaacgcgaatgagtggcggtggggtgacttactatcttgaacaggcacgccagaaatctaatgcccgcatgatcatcatcgatccgcgctataccgacaccggtgccgggcgcgaagatgagtggatccctattcgtccgggaacagatgccgcactggttaacggtctggcgtacgtcatgatcactgaaaacctggtggatcaggcattcctcgataaatattgcgttggctacgatgagaaaaccctgccagccagtgcgccgaaaaatggccactataaagcttatattctgggtgaagggccagatggcgtggctaaaacgccggaatgggccagccaaatcactggtgttccggcagacaaaatcatcaaattggctcgtgaaatcggtagtaccaaaccggcgtttatcagccagggatggggcccgcagcgtcacgctaacggtgaaatcgcaacccgtgctatcagcatgctggcgattctgaccggtaacgttggtattaacggaggcaacagcggcgcgcgtgaaggtagttacagcttaccgtttgtccgtatgccgaccttggaaaacccgatccagaccagcattagcatgtttatgtggaccgatgccattgaacgtggcccggaaatgacggcgctgcgtgatggtgtacgcgggaaagataagctggatgtgccgatcaaaatgatctggaactatgccggtaactgcctgattaaccagcattctgaaatcaaccgtacccatgaaatccttcaggatgataagaagtgcgagctgattgtggttatcgactgccacatgaccagtagcgcgaaatatgctgacatcctgctgcctgactgcaccgcttccgaacagatggactttgcgctggatgcatcctgcgggaatatgtcttacgtgattttcaacgatcaggtgattaaaccgcgctttgaatgtaagaccatctatgaaatgaccagcgaactggcaaaacgtcttggcgttgagcaacagtttactgaaggccgtacccaggaagagtggatgcggcatctgtatgcccagagccgggaagcgattcctgaactgccaacgtttgaagagttccgcaagcaggggatctttaaaaagcgcgacccacaagggcatcacgttgcttataaagccttccgtgaagatccgcaggcaaacccactgactacgccaagcggcaaaattgagatttatagccaggcgctggctgacattgccgctacctgggaattgcctgaaggcgatgtgatcgatccactgccgatctacacgccgggctttgaaagttatcaggatccgctgaacaaacagtatccgctgcagcttacaggtttccactataaatctcgcgttcacagtacttacggcaacgttgatgtgctgaaagcggcttgccgtcaggaaatgtggatcaacccgcttgatgcccaaaaacgcggtatccacaacggcgataaagtcaggatctttaacgatcgtggtgaggttcatattgaggcgaaagtgacgccacgaatgatgccgggtgtggtcgcactgggtgaaggtgcctggtatgacccggatgcaaaacgtgtcgataagggtggttgtattaacgtactgaccactcaacgtccgtctcctctcgctaaggggaatccgagtcatacaaaccttgttcaggttgaaaaggtgtaaggagtaaccgatgacaacccagtatggattttttattgattccagccgttgcaccggttgcaaaacctgcgagctggcctgtaaagactacaaagatttgacgccagaagtcagcttccgccgcatttatgaatatgctggcggcgactggcaggaagataacggtgtctggcaccagaacgtgtttgcctactatctgagcattagttgtaaccactgcgaagatccggcttgtactaaagtctgcccgagcggtgcgatgcataaacgtgaagatggttttgttgtggtcgatgaagatgtgtgcattggctgccgctactgccatatggcttgcccgtatggcgcaccgcaatataacgaaacgaaaggccatatgaccaaatgcgatggttgttatgaccgtgttgcggagggtaaaaagccgatctgtgttgaatcttgtccgctgcgggcgctggatttcggccctatcgacgagctgcgtaaaaaacatggcgatctggcggccgttgcgccgttgccgcgagctcactttaccaaaccgaatattgtgatcaaacccaatgccaatagccgcccgaccggggataccactggctatctggcaaacccgaaggaggtgtgagatgggaagtggatggcatgaatggccgctgatgatcttcacggtcttcgggcaatgtgtagcaggtggttttatcgttctggctttggcgctgctcaaaggcgacctgcgagcagaagcccagcagcgtgttatcgcctgcatgtttggtttatgggtgctgatgggcattggctttatcgcctctatgctccatcttggtagtccaatgcgcgcttttaacagcctcaaccgggtaggggctagtgcactcagtaacgaaatcgccagcggtagcatcttttttgccgtaggcggcatcggctggttgctggcaatgctgaaaaagctgagtccggcattgcgtacgctgtggctgatagtgacgatggttcttggcgtcatctttgtctggatgatggtgcgtgtgtataacagcattgataccgttccgacctggtacagcatctggacgccgatgggcttcttcctgacgatgtttatgggcggcccgttactgggttacctgttgttgagtctggctggcgtcgatggctgggcgatgcgtctgctgccagcaatttctgtactggcactggtagtgagtggcgtggtgagtgtgatgcagggcgcagagctggcgactattcatagttctgtgcagcaggccgcagcgctggtgccggactatggtgcgctgatgtcctggcggatcgtgcttttggccgttgccctgtgcttgtggattgcaccacagctaaaaggttatcagcctgcggttccgctactttctgtaagtttcattctgcttctggcaggggaattaatcggtcgcggcgtattctatggtttgcatatgaccgtggggatggccgtcgcaagctaatcataacaaccggggtttcggccccggttctcttttatttctgcttcgttaacgtgtcataactggtcatcaaattacgataatcaggaatgtggttagagaacaacgtcgccagtccttcaatatcattacgccagtcgcgatgcagctcgcacgccacgccgaaccatgtcatcaattgcgcaccagcttggctcaagcgatcccatgcgctatgccgggtaatttcattaaaggtcccactcgcgtcagtcacgacaaagacgtcaaacccttcttcaatggcactaagcgccgggaatgccacgcaaacttcggttaccacaccggcaataattaactgttttttacctgtcgctttgacagcttttacaaaatcttcgttatcccaggcgttaatatttcccgggcgagcaatgtaaggtgtatcggggaattgtgctttcagttctggaactaatgggccgttaggaccggtttcaaaactggtggtaagaatagttggtaagttgaaatacttagccaggtcacccagcgccagcacgttatttttaaacttatcgggttcgatatcccgtacaagggaaagtaaaccagcctggtgatcaacaagcaaaacggcagcatcatttttatcaagacgaacatacggtttggtcatcctcttctcctttcgagagtcagtggtacgtctgaaatcgatcagacgcgatgcattgctctgaaagcatagacgggaaatatgagtttgctgtgaccatgaaatttttcgactgaacgaagcgtatgaaatttgtgttagttcaataaaaacaatcagatgagactaatcatctcttcagcattagcgttatgaatgagtaatataaatcgataataccgccgctgggatatcgcgtattttcacccattgacaatgtttttggcggtggcatgatgcgcatgaaatttgaacttcctcacggttttaattcatgtccacgtatacccagcctgtcatgcttttgctgtctggcctgcttttgttgactctggcgattgcggtgttaaatacactcgtgccgctttggctcgcccaggaacacatgtccacatggcaggtaggcgttgtcagcagttcctattttaccggcaaccttgtcggtacattgctgacagggtatgtcattaagcgcattggctttaaccgcagctattatctggcctccttcatttttgccgctggctgtgccggccttggcctgatgattggattctggagctggttggcttggcgttttgtcgcgggcgtcggctgtgccatgatttgggtggttgttgagagcgcgctgatgtgcagtgggacgagtcgtaaccgtgggcgtttgcttgctgcgtatatgatggtttattacgtgggaacgtttttaggccagttactggtcagcaaagttagtaccgagctgatgtccgtattgccgtgggttacaggtttgacgttggcagggatcttaccgctgttgtttacgcgtgtgctgaatcagcaggctgaaaaccatgatagcacgagtattacgagtatgctaaaactccgtcaggcgcggcttggcgtgaatggctgcattatcagtggaatcgttctgggatctctatatggcctgatgccgctgtacctcaatcacaaaggggtgagcaatgccagcattggtttctggatggcggtactggtcagtgcgggtatccttggacaatggccgattggacgtctggcggataagtttggtcgactgctggtgttgcgtgttcaggtctttgtcgtcattctcggcagtatcgcgatgcttagccaggcggcgatggccccagcgttattcatcctcggtgccgctggctttacgctatatccggtggcgatggcatgggcttgcgagaaagttgaacatcatcaactggtggcgatgaaccaggccttactgttgagctatactgtgggaagcctgcttggcccgagttttaccgctatgctaatgcagaatttctccgataatttattgtttatcatgatcgccagcgtaagctttatctatttgctgatgctgctgcgcaacgccggtcatacgccgaaacccgttgctcacgtgtaaatgaattcaagcagagtgtgaacttactgtttcacactctgcttttttgtttcttctatctgacttgctttattccaaattttattcgtttaaaaataaaatgtgcagcaggttataattttgcatttcgctatttccgcacttcttatttgccgcgcataatccctcgttttaccgatgcccctttaattttggcgaaggatttgtctatggctgggaatgttcaggaaaaacagttgcgatggtacaacattgcgctgatgtcttttatcactgtctggggttttggcaacgttgttaataactatgccaaccaggggctggtggttgtttttagttgggtgtttatctttgcactctatttcacaccttatgcgctaattgttggtcagttaggcagcaccttcaaagatgggaagggcggggtcagtacctggattaaacacacgatgggacccggactggcttatctcgccgcgtggacctactgggtggtgcatattccctatctggcacaaaaaccccaggcaattctgattgcgctcggttgggcgatgaaaggcgacggtagcctaatcaaagaatatagtgtcgtagcgttacaggggttaacgctggtgctgtttatcttctttatgtgggttgctagtcgcggtatgaaaagcctgaaaatcgtcggttctgtggcagggattgctatgtttgttatgagtctcctgtatgtggcgatggcggtaaccgcgcctgcaattactgaagtgcatattgcgaccacaaacattacctgggaaacgttcattcctcatatcgactttacctacattaccactattagtatgctggttttcgcggttggcggagcagagaagatttctccttacgttaatcaaacgcgcaacccaggaaaagaatttccaaaagggatgttatgcctggcggtgatggttgcggtttgtgccattctgggcagcctggcgatggggatgatgtttgatagccgtaatatcccggatgacttaatgaccaacggtcagtattacgcctttcagaagctgggcgagtattacaacatgggtaatactttaatggtgatttacgccattgcgaataccctgggacaagtagcggcgctggtattcagcattgatgccccgcttaaagtgctattaggtgatgctgacagcaaatatattccagccagtttatgtcgtaccaacgcttctggtacgcccgttaatggctattttctgaccctggtactggtggcgattctgattatgctgccgactctcggcattggtgatatgaacaatctctataaatggctgttgaaccttaatagcgtagtgatgccgctgcgttatttatgggtatttgttgcatttattgcagtcgttcgcttggcgcagaaatataaaccagaatatgtctttattcgtaataagcctctggcaatgaccgtcgggatttggtgttttgcctttaccgcctttgcctgtttgacggggatcttcccgaaaatggaagccttcactgcagagtggaccttccagttggcgctgaatgttgcaacgccgtttgtgctggtaggattaggactgatattcccgctgctggcgcgtaaagcgaatagtaaataattattgtggtcggtgacgctgactctggcagatctgacccgtttttacataatcgagaaatgcgcgcaagccgcaggacatatactggcggtttggataatagatctggaagcctggacgctctgtgctccagtcttccagtacacattctaaacgaccagtatcaaggtactccttgatctgttcatagagcagatacccgataccagcacccatcaaaacggcctccagttcagcatcaacatcatccagaatgatatttcctgcgacagcaatttccagctcctttgcaaattgccagtggaaaggtttgccgctgggataacgaaaaacaacacattgatgattaagcagatcatgaggatggcggggtttgccatatcttgcaaagtactctggcgttgctgctacacataatttcactggcgggccgatcgccacgctgatcatatctttttcgacgatgcaactaagtcgaacgccagcgtcaaagccctgttggacgatatcgacaagagagtcgtcagttgtgagctcgactttaatatcaggatattcacgtgtgaaaccaaccagtaaagacattaaaaatatacgtgcagctacccgggcggcattgattttgagcgttcctgtcggtgtcagacgaaaatcattcatctcatctaacatgatctgaatttcgtcgaaagctgggcgcaatcgttcatagagattagaacccgcttccgttaagcttacgcttcgggttgtccgattgaataagcgaattttaagacgttgttccagtgttttaatactatggctaatggcggagctggataagcctaactcatcgcccgctgcacgaaagctttgattacgggccacggcaaagaaagtggcaaagtcagacatattcatccgcattagtgaaaatccttcattaactcatcctgaatcatcacgtttacaggattatgccgcctgcgtaaagtgcgctccagaacttaacgtggaggtaaaattatgcagtctgaacgtatttatttggtatgggcccatcctcgtcatgatagtttgaccgcacatattgctgatgcgatccatcagcgggcaatggagcggaaaatacaggtgacggaactcgatttatatcggcgtaatttcaacccagtgatgacgccggaagatgaaccagactggaagaatatggataaacgttattctccagaggttcatcagctttatagtgagctgcttgaacatgacacgttagtggtggtttttcctctctggtggtacagcttcccggcaatgctaaaaggatatattgacagagtatggaataatgggctggcttatggagatgggcacaaattaccattcaataaagttcgttgggtggcgctggttggaggagacaaagaaagttttgtccagatgggctgggaaaaaaatataagcgattatttaaaaaatatgtgcagttatcttggtattgaagatgccgatgtcactttcttgtgtaatacagtggtattcgatggggaagaacttcacgcgagctattatcagagcttattatctcaggtacgggatatggtagatgcactataagatgtgttaaaaacgctgtagcagaatgaagcgcggaataaaaaagcggcaactcaataaagttgccgctttacggggaaattagaacattaccttatgaccgtactgctcaagaatgcctttcacgcgttccatggtctctttcttcggtggtttaacaccgtcgagtttgtactcttcacccattgccacccatttgtgtttgcccagctcgtggtaggggagaagctcgattttctcaacgttgcccatatcacgggtaaattcaccgaggcgatgcgcactatcgtcatcgtcagaccagcctgggacaacaacgtagcggatccacaccttcacatttttgttcgccagatatttagcgaactccagcgtgcggtggttggaaactccaaccagattttggtggatctcgtcgttcatctgtttgagatcgagcattaccaggtcggttacttccagcagttcatcaatcaccggatcgtaacgacgaacaaaaccgttggtgtccagacaggtatgaatgccttcttttttgcaggcgcggaaccagtcacgaacaaactcagcttgcaggattgcttcaccgccggatgcggtaacgccgccgccggaagcgttcataaagtggcgataggtcaccacttccttcatcaaatcttcaacggtaacttctttaccgccatgcgtgtcccaggtgtcgcggttatgacaatacaggcagcgcatcaggcagccctggaaaaaggtgataaagcgaatacctgggccgtctacggttccacaggattcaaaggagtgaatgcgaccaataacactcattgcggtgtttctccagatgtggcccatctgaggccgtgttggtgcgcagctcgaaggctacgtcgagtctgttttggcagtcaccttaaagtatagatagctgacaaaaaaggctctcgcgctaaaaaaggccccactttcgtggagcctttattgtacgctttttactgtacgatttcagtcaaatctaattacatagattgagtgaaggtacgagtaataacgtcctgctgctgttctttagtcaggctgttgaaacgtactgcgtagccagatacacggatggtcagctgcggatatttttccgggttttccatcgcgtcgagcagcatttcacggttcatcacgttaacgttcaggtgctgaccaccttcgatggatgcttcgtggtggaagtaaccatccatcagaccagccaggttggtcttacgaacttcgtcgtctttacccagtgcgttcggaacgatagagaaggtgtaggagataccatctttagcgtaagcaaacggcagtttagcaacggaagtcagagaggctactgcacctttctggtcacgaccgtgcatcgggttagcacccggtccgaacggcgcgccagcacgacgaccgtctggggtgttacccgttttcttaccatacacaacgttagaagtgatggtcagaacagactgagtcgggatagcgtcacggtaggtgtgcagtttctgaattttcttcatgaaacgttctaccaggtcaacagccaggtcatctacacgcggatcattgttaccaaactgcgggtattcgccttcgatttcgaagtcgatagccagaccgtcttcgtcacgaatcggtttaactttcgcatatttgattgcagacagggagtcagcagcaacggacagaccagcgataccacacgccatggtgcggataacgtcacggtcgtgcagcgccatcagagaggcttcgtagctgtacttgtcgtgcatgtagtggatgatgttcagtgcagtgatgtactgtttagccagccagtccatgaagtgatccatgcgctccatcacttcatcatagttcaggacatcgcctttgatcggttcagacttcggaccaacctgcattttcagtttttcgtcaacgccgccgttgattgcgtacagcatggttttcgccaggtttgcacgcgcaccgaagaactgcatttgtttaccaacgatcatcgggcttacgcagcaagcaatagcgtagtcatcgttgttgaagtccggacgcatcaggtcatcgttctcatactgcagagaagaggtgtcgatggacactttagcggcgaatttcttgaagttcagcggcagtttttcagaccacagaatggtcatgttcggttccggagacggacccatggtgtacagggtgttcaggaaacggaagctgtttttggtaaccagggtacgaccgtcgaggcccataccaccgatagattcggttgcccagatcgggtcgccagagaacagttcatcgtattccggagtacgcaggaagcgaaccatacgcagtttcatgaccaggtggtcaaccatttcctgcgcttcttgttcggtgatcttgccagctttcaggtcacgttcgatgtacacatccaggaaggtggaggtacgaccgaaggacattgcagcaccgttctgagacttaacagcagccaggtagccgaagtaagtccactggatagcttcctgagcgttggtagccggaccagagatgtcgtagccgtatttcgcagccatttctttcatctgacccagagcgcggtgctgttcagcgatttcttcgcgcagacggatagtctgttccaggtttacgccgttttccagatcagcctgcagagaagtgaactgtgccagtttgtctttcatcaggtagtcgataccgtacagcgcaacgcgacggtagtcaccgatgatacggccacggccatatgcatctggcagaccggtcagaacaccagatttacggcaacgcaggatgtccggagtgtaaacgtcgaacacgccctggttgtgagttttacggtattcagtgaagatttttttgatcatcggatccagttcgcggttgtacgctttgcaggaaccttcgatcattttgataccaccgaacgggataagagcacgtttcagcggagcttcagtctgcagaccaacgattttctcaagctgcttgttgatgtagccagcgtcgtgagaggtgatggtggaagcaacagcggtgtcaaagtcaactggcgcgtgagtgcggttttccagtttaacgccttccattactttgtcccacagggtggtggtcgcttcagtagcgccagccaggaaggactcgtcaccctcgtacggagtgtagtttttctgaatgaagtcacggacgtttacttcattctgccagtcacctttggtaaaaccttcccaggctgtggctaacttttcattaagctcggacatgtaacacctaccttcttaagtggattttttatttactgcgtacttcgacaaccattaatggtggtcgttttcacgcaggtaaatgacccagtatgtcaacccaaccaacaaaccaccaccgataatgttgccgatcgtaaccggaatcaggttatcagtgatgaaattcatcacggtcaggtgagaaaaattttccggtgcagaaccgactgcggtccaaaattccggggatgcgaagtcgcggattacaatacccatcgggatcataaacatgtttgcgatactgtgctcaaaaccgctggcaacaaacatcgcgaccggcagcaccataatgaacgctttgtccatcaggctgcggccagaataactcatccatactgccagacataccatcaggtttgccaggataccaagacagacggcctcaataaaagtatggtgcactttgtggtcggcggtttgtaggacgtttagtccccattgaccatttgcggtcatatactcgccggaaagccacattaaaagtacaaacagcagtgcgccgaccaggttgccaaaatagacatttagccagtttttcgccaactgaccccaggtgatgcgcccactcgccttagcaacaacaatcaacacggtggaagtaaagagatcggctccgcagacaacacaaagaatcagccccagagagaagcaaatgccgccaaccagttttgccatgccgaagggcattgtgcctgtgccagtggttgctgtgatatagaagacgaatgcgatactgatgaaaacaccggcggtaatcgccagatagaaagtcttaagcggatgtttcgttgctttatagacacccgcctcttcggccactttggccattgcagcaggaagtaaaagatcaaaagggttgtcagctttcacactaactctctctttattaagtcggcgacgagatactaacaaagcattatagatgagaaattgatatagatcatatctcgcctggcttataggcccgtaactcgcatggtttttatgcaaatacggagtaaatatttgattatccaaataaaaataaattttaaaaattaacaaatgagttgaattttttccgcatcctccgctaaaacagttaattaaaagggagcatcaggcgaataaagtaacaatatcgatcgtatttattaaatacaaattaccgatatttaaccttataattacaattattttattaatgcaaatatatgtaaagcggggcattaaaaaaacgccccgtaatataactcagactaatcattaagcctacattgcgtaggctatttgattttattttgcccagaatgctgctttggcgcgctgcagcttttcgtaggccttcaacaagctctgatgtgcagcaaacgcgtgcagatcgctatctaccggttgcaggccgtaaaacgccgcttcgccgctcattgccgcactggcggcttctacggcatctgcgccgtacatgcgaacaaacgcattcagatattgcagcggctggcgatcttcttcctgtgccagtaataacaacgtttgcaggcagcgataatagttggcgcgttccggactaaatacactactgttaaactccatcgtccattcggtccagaccagagcctgttccagatcgccaccagccagcgccagcatggcttttaattcaccgatacgcagggtgtaccaaccgttatcgctcccggtcgccagacccaacagctcacgcacgcgggtaaagtcatcaaaaccttcttcatccagttgctcgatgaggttcaggtaatcttctttttcccactcgctgcctggtaggctaagaatcgtttcacgtaaatggctgcccatactgttattcgcgagccacagatcttcagccggataaatatcggacatgccaggcacgataatacggcaagcataaacgcccagatgctcgtaatcggcaatataaacttctttatcttctttgttgaagatagccatcagtgtggcgaactcttcttccgtggtgccggagaaattccagtccacaaacggataatcggcatcctgcttgaacaggtcccaggagattaaaccgctggaatcgataaagtgcgtttcgaggttggtatgttcagcgacttcttcatcatcgaaggttggcggagtaaacacatccaaatctttcaggccacgaccttgcagcagctcggtcacggtacgttccagtgctacgccaaaatcaggatgcgcaccgaaagaggcaaagcaggtaccgttagcaggattgaacagtaccacgcaaatcaccggatactggccgccaaggctaccgtcataagcgaagattgggaaaccctccgcttccagcgtttcgatggcttcaactactgctgggtaacgcgccagcacgtctgccgggatctctggcaggctgatgctttcagcaataatgcggtttttcacgtagcgttcgaaaacttcagacaatccctgaacgcgtgcttcgttgcgggtattacctgcggacataccgttggagacgtacaggttaccaatgatattcatcggaatataaacggtctgattgtcggactgacgcgtaaacggcaggccgcaaataccacgatcttcgttaccggattgtaggtcaatcagcatgctgccggtcagttcattctccggatcataaaacgcgcgcagacggtcatcgagcagcccttctggcacatcgtcattttcggtcagtgggaaccatttttcgttgggataatgcacgaacggaccgttggcgatggtttcgcccagccagaagtccgcaaaaaagtagttggtactgagacgctcgaaatattcaccgagtgcagaagccagcgccgctttcttggttgcgcctttaccgttggtaaaacacagtgcgcactctttgtcgcgaatatgtacagaccagacgttaggcacgggattcagccaggaggcctcttcaatctgaaagccgaggtcactaagtttttgctggaagcgagcgatggaatcttccagagcggcatctttgccggggataaatgtttgcgtcatgaaaatcactttagtcgtacggaaagcgcgcaataatacgggttttatctcaaaggcgctatcaccgccgccatgccgatgaactgttgactatgcttttagcggataaaccacgttaagagcataaaaatgaaggcgttcgatctccaccgtatggcatttgataaagtgccttttgatttccttggcgaagttgcactacgtagtctttatacctttgtactggtctttttgttcctcaaaatgaccggaagacgcggtgtgcggcagatgagcctgtttgaagttttaatcattctgacgctgggaagtgcggcgggagatgtggcgttttatgatgatgtgccgatggtcccggtacttatcgtctttattactctggcgttgttataccgcctggtaatgtggttgatggcgcacagtgaaaaactggaagatcttctggaaggcaagccagttgtcattattgaagatggcgagctggcctggagcaaactcaataactccaacatgacggaatttgagttctttatggagctacgattgcgtggcgtggagcagctggggcaggtacgtctggcgattctcgaaaccaacgggcaaatcagtgtctatttctttgaagatgacaaggtgaaaccgggtttacttattttacccagtgattgtacgcagcgttacaaagtggtgccggagagcgcggactatgcctgtattcgttgtagtgaaatcattcatatgaaagcgggggaaaaacaattatgtccgcgctgtgcaaatccagaatggacgaaggcaagtcgggcaaaacgggtgacctgacagtaaaaacatcggctttttgctaataatccgagagattcttttgtgtgatgcaagccacatttttgccctcaacggttttactcattgcgatgtgtgtcactgaatgataaaaccgatagccacaggaataatgtattacctgtggtcgcaatcgattgaccgcgggttaatagcaacgcaacgtggtgaggggaaatggctcaaatcttcaattttagttctggtccggcaatgctaccggcagaggtgcttaaacaggctcaacaggaactgcgcgactggaacggtcttggtacgagcgtgatggaagtgagtcaccgtggcaaagagttcattcaggttgcagaggaagccgagaaggattttcgcgatcttcttaatgtcccctccaactacaaggtattattctgccatggcggtggtcgcggtcagtttgctgcggtaccgctgaatattctcggtgataaaaccaccgcagattatgttgatgccggttactgggcggcaagtgccattaaagaagcgaaaaaatactgcacgcctaatgtctttgacgccaaagtgactgttgatggtctgcgcgcggttaagccaatgcgtgaatggcaactctctgataatgctgcttatatgcattattgcccgaatgaaaccatcgatggtatcgccatcgacgaaacgccagacttcggcgcagatgtggtggtcgccgctgacttctctagtaccattctttcccgtccgattgacgtcagccgttatggtgtaatttacgctggcgcgcagaaaaatatcggcccggctggcctgacaatcgtcatcgttcgtgaagatttgctgggcaaagcgaatatcgcgtgtccgagcattctggattattccatcctcaacgataacggctccatgtttaacacgccgccgacatttgcctggtatctatctggtctggtctttaaatggctgaaagcgaacggcggtgtagctgaaatggataaaatcaatcagcaaaaagcagaactgctatatggggtgattgataacagcgatttctaccgcaatgacgtggcgaaagctaaccgtagccggatgaacgtgccgttccagttggcggacagtgcgcttgacaaattgttccttgaagagtcttttgctgctggccttcatgcactgaaaggtcaccgtgtggtcggcggaatgcgcgcttctatttataacgccatgccgctggaaggcgttaaagcgctgacagacttcatggttgagttcgaacgccgtcacggttaatgccgaaattttgcttaatccccacagccagcctgtggggtttttatttctgttgtagagagttgagttcatggaatccctgacgttacaacccatcgctcgtgtcgatggcactattaatctgcccggttccaagagcgtttctaaccgcgctttattgctggcggcattagcacacggcaaaacagtattaaccaatctgctggatagcgatgacgtgcgccatatgctgaatgcattaacagcgttaggggtaagctatacgcttagtgccgatcgtacgcgttgcgaaattatcggtaacggcggtccattacacgcagaaggtgccctggagttgttcctcggtaacgccggaacggcaatgcgtccgctggcggcagctctttgtctgggtagcaatgatattgtgctgaccggtgagccgcgtatgaaagaacgcccgattggtcatctggtggatgcgctgcgcctgggcggggcgaagatcacttacctggaacaagaaaattatccgccgttgcgtttacagggcggctttactggcggcaacgttgacgttgatggctccgtttccagccaattcctcaccgcactgttaatgactgcgcctcttgcgccggaagatacggtgattcgtattaaaggcgatctggtttctaaaccttatatcgacatcacactcaatctgatgaagacgtttggtgttgaaattgaaaatcagcactatcaacaatttgtcgtaaaaggcgggcagtcttatcagtctccgggtacttatttggtcgaaggcgatgcatctagcgcttcttactttctggcagcagcagcaatcaaaggcggcactgtaaaagtgaccggtattggacgtaacagtatgcagggtgatattcgctttgctgatgtgctggaaaaaatgggcgcgaccatttgctggggcgatgattatatttcctgcacgcgtggtgaactgaacgctattgatatggatatgaaccatattcctgatgcggcgatgaccattgccacggcggcgttatttgcaaaaggcaccaccacgctgcgcaatatctataactggcgtgttaaagagaccgatcgcctgtttgcgatggcaacagaactgcgtaaagtcggcgcggaagtggaagaggggcacgattacattcgtatcactcctccggaaaaactgaactttgccgagatcgcgacatacaatgatcaccggatggcgatgtgtttcagcctggtggcgttgagtgatacaccagtgacgattcttgatcccaaatgcacggccaaaacatttccggattatttcgagcagctggcgcggattagccaggcagcctgaatgaacaacgggcaataaatagccaaatctttctttatcaaaacgtcggcacattgtcggcgttttttttcggaccttgtgagtcattttgattaatggtagcgtcgcttgtcaatgtaagttgttgatacataatatttatatatgattaatcaacggatgattcacatgaagaatactaaattactgctggcgattgcgacctctgcagcattactgacagggtgtcaaaatacccacggtattgataccaatatggctatcagctccggtttaaatgcctataaagcagcaacattaagcgatgccgatgcaaaagcgattgccaatcagggctgtgccgaaatggacagcggcaatcaagtcgcaagtaaatccagcaagtacggtaaacgtctggcaaaaatcgccaaagcattgggtaacaatattaatggcacgccggtcaactataaggtttatatgaccagcgacgtcaacgcatgggcgatggcgaacggctgtgttcgtgtctacagtggcctgatggacatgatgaatgacaacgaaattgaaggcgttctgggccatgaactgggccacgtcgcgttgggtcacagcctggctgaaatgaaagcttcttatgcgatcgttgccgcacgcgatgccattagtgctaccagcggtgtggcttcccagctttcccgcagtcaattaggtgatatcgcagaaggcgctatcaatgctaaatactcccgtgataaagagtccgaagcagatgatttctcctttgatctgttgaagaaacgtggcatcagcacccaggggctggttggcagctttgaaacactggctagcctggatggcggtcgcacccagtccatgtttgactctcacccaccaagtacagagcgtgcgcaacacatccgtgatcgtatcgcctctggtaagtaaatcattgtcatctttcgggctggtcttctgccagcccgctataattgcgcaataaatccccatctgaatacagacaaaactggtttttgcacacaacgttaacgatttgtggcgtcggcgcgtataatgcgcgcggttatgttaacggtacgcctgttttaaggagataaagatgacggcaattgccccggttattaccattgatggcccaagcggtgcagggaaaggcaccttgtgtaaggctatggcggaagcgttgcaatggcatctgctggacagcggtgcaatttatcgcgtactggcattggcggcattacatcaccatgttgatgttgcgagcgaagatgcgctggtaccgctggcatcccatctggatgtacgttttgtgagcaccaatggcaatctggaagtgatcctcgaaggggaagatgtcagcggcgaaattcgtactcaggaagtggcgaatgcagctagtcaagtcgcggcattcccacgcgttcgtgaagcattattgcgtcgccaacgcgcgtttcgcgaattaccaggtctgattgccgatggccgcgacatgggaacggtggtattccctgatgcaccagtgaaaattttccttgacgcctccagcgaagaacgtgcgcatcgccgcatgctacagttgcaggagaagggctttagtgttaactttgagcgccttttggccgagatcaaagaacgcgacgaccgcgatcgtaaccgagcggtagcgccactggttccggcagccgatgctttagtgttggattccaccaccttaagcattgagcaagtgattgaaaaagcgctacaatacgcgcgccagaaattggctctcgcataagcgaccgaatttgcagtacccccgttgcaatggaatgacagcgggtatgttaaacaaccccatccggcatggagccaggtggacgttaaatataaacctgaagattaaacatgactgaatcttttgctcaactctttgaagagtccttaaaagaaatcgaaacccgcccgggttctatcgttcgtggcgttgttgttgctatcgacaaagacgtagtactggttgacgctggtctgaaatctgagtccgccatcccggctgagcagttcaaaaacgcccagggcgagctggaaatccaggtaggtgacgaagttgacgttgctctggacgcagtagaagacggcttcggtgaaactctgctgtcccgtgagaaagctaaacgtcacgaagcctggatcacgctggaaaaagcttacgaagatgctgaaactgttaccggtgttatcaacggcaaagttaagggcggcttcactgttgagctgaacggtattcgtgcgttcctgccaggttctctggtagacgttcgtccggtgcgtgacactctgcacctggaaggcaaagagcttgaatttaaagtaatcaagctggatcagaagcgcaacaacgttgttgtttctcgtcgtgccgttatcgaatccgaaaacagcgcagagcgcgatcagctgctggaaaacctgcaggaaggcatggaagttaaaggtatcgttaagaacctcactgactacggtgcattcgttgatctgggcggcgttgacggcctgctgcacatcactgacatggcctggaaacgcgttaagcatccgagcgaaatcgtcaacgtgggcgacgaaatcactgttaaagtgctgaagttcgaccgcgaacgtacccgtgtatccctgggcctgaaacagctgggcgaagatccgtgggtagctatcgctaaacgttatccggaaggtaccaaactgactggtcgcgtgaccaacctgaccgactacggctgcttcgttgaaatcgaagaaggcgttgaaggcctggtacacgtttccgaaatggactggaccaacaaaaacatccacccgtccaaagttgttaacgttggcgatgtagtggaagttatggttctggatatcgacgaagaacgtcgtcgtatctccctgggtctgaaacagtgcaaagctaacccgtggcagcagttcgcggaaacccacaacaagggcgaccgtgttgaaggtaaaatcaagtctatcactgacttcggtatcttcatcggcttggacggcggcatcgacggcctggttcacctgtctgacatctcctggaacgttgcaggcgaagaagcagttcgtgaatacaaaaaaggcgacgaaatcgctgcagttgttctgcaggttgacgcagaacgtgaacgtatctccctgggcgttaaacagctcgcagaagatccgttcaacaactgggttgctctgaacaagaaaggcgctatcgtaaccggtaaagtaactgcagttgacgctaaaggcgcaaccgtagaactggctgacggcgttgaaggttacctgcgtgcttctgaagcatcccgtgaccgcgttgaagacgctaccctggttctgagcgttggcgacgaagttgaagctaaattcaccggcgttgatcgtaaaaaccgcgcaatcagcctgtctgttcgtgcgaaagacgaagctgacgagaaagatgcaatcgcaactgttaacaaacaggaagatgcaaacttctccaacaacgcaatggctgaagctttcaaagcagctaaaggcgagtaattctctgactcttcgggatttttattccgaagtttgttgagtttacttgacagattgcaggtttcgtcctgtaatcaagcactaagggcggctacggccgcccttaatcaatgcagcaacagcagccgcttaatttgcctttaaggaaccggaggaatcatgaccaagagtgaattgatagaaagacttgccacccagcaaagccacattcccgccaagacggttgaagatgcagtaaaagagatgctggagcatatggccagcactcttgcgcagggcgagcgtattgaaatccgcggtttcggcagtttctctttgcactaccgcgcaccacgtaccggacgtaatccgaagactggcgataaagtagaactggaaggaaaatacgttcctcactttaaacttggtaaagaactgcgcgatcgcgccaatatttacggttaagttttttactcaaacttgaacgagagaaaagcacctgtcgggtgcttttttcatttctctaatctggaactggaagctgcctcgcagagttttgaacagttttcaccctttcgttaaattcttctgaatatgcctcggggaacgcaaaattcccaccagacaaccgctcaacaaagttgcacactttccataaacagggaggggtgcatgaaaataacgacagtcggtgtatgcataattagcggaatttttccgttgctgattttgccccaattgcctgggacattaacccttgcgtttctgactctcttcgcctgcgtactggcatttatccctgttaaaaccgtccgttatatcgcgctgacgttgctgtttttcgtttggggcatattaagtgcaaagcaaattttgtgggcaggagaaaccttaactggcgcgacgcaggatgcaattgttgagatcactgcaactgacggcatgaccactcattacggtcaaattactcatctacaaggtcgacgtatattccctgcgagtggtctcgtgatgtatggcgaatatcttccgcaagcggtttgtgctggacaacaatggagtatgaaactcaaagttcgtgcagttcatggccaacttaatgatggcggctttgatagccagcgttatgccattgcccagcatcagccgctcaccggccgttttctgcaggcaagtgtcattgaaccgaattgtagcctgcgtgcacagtatctggcgagtctacaaacaacgctgcaaccctatccgtggaatgcggttattcttggtttaggtatgggggaacggttatccgtccccaaagaaatcaaaaatatcatgcgcgatactggaacggcgcatttaatggcgataagcggattgcacatcgcttttgcggcgttgctggctgccggactcattcgcagtggacaaatttttctgcctgggcgctggatccactggcaaataccattaattggcggaatctgctgtgctgctttttatgcctggttgacgggaatgcaacctcctgcattgcgtaccatggtggcgcttgctacgtggggaatgcttaagttaagtgggcgacagtggagtggctgggatgtatggatatgttgtctggcggcaattttgctgatggatcctgttgccattctcagccaaagtttatggctctctgccgctgcggtcgcggcattgatattttggtatcagtggcttccctgtcctgagtggcaactgccgccggtattgcgtgcagttgtttccctcatccatctgcaactgggaatcacacttctgcttatgcccgtgcaaatcgtcatatttcatggcattagtctgaccagctttattgcaaatctattagcaattcccttggtgacatttatcacggttccgttgatcctcgccgcgatggttgtgcatttaagcgggccgttaatcctggagcaagggttatggtttcttgccgaccggtctttggctttacttttctgggggttaaagagtttgccggaagggtggatcaacattgctgaatgttggcaatggctaagtttttccccatggttcttactggtggtatggcgattaaacgcctggcgaacgttgccagcaatgtgtgtggctggaggcttgctgatgtgctggccgctgtggcaaaaacctcgacctgacgagtggcagctgtacatgcttgatgtcgggcaagggctggcaatggtgatagccagaaacggcaaagcgattctctatgacacaggactggcctggcctgaaggggatagtgggcaacaactgattatcccctggctccactggcataatcttgaaccggaaggcgttattctgagccatgaacatctggatcaccggggagggctggatagtatattgcatatatggccgatgttatggatcagaagtccgttaaactgggaacatcatcagccctgtgtgcgtggcgaagcgtggcaatggcaaggattgcgtttcagcgcgcactggcctttacaaggtagcaacgataaaggaaataaccattcctgtgtggttaaggttgatgacgggacgaatagcattcttctaaccggtgatattgaagccccagctgaacaaaagatgctaagccgttactggcagcaagtgcaggcaacattgcttcaggtacctcaccatggcagtaataccagtagtagcttgccattaattcagcgagtgaatggaaaagtggcactcgcaagcgcaagccgctataacgcatggcgactgccctctaacaaagttaagcatcgctatcaactgcaaggatatcaatggattgatactccacatcaaggtcaaacaacggtcaattttagtgcgcaaggctggcggattagcagcctcagggagcaaattttacctcgttggtatcatcagtggtttggcgtgccagtggataacgggtaaaatatgcggctatttcaacaaatgctggttttttgaatgcataacgacaaagatctctctacgtggcagacattccgccgactgtggccaaccattgcgcctttcaaagcgggtctgatcgtggcgggcgtagcgttaatcctcaacgcagccagcgataccttcatgttaagcctccttaagccacttcttgatgatggctttggtaaaacagatcgctccgtgctggtgtggatgccgctggtggtgatcgggctgatgattttacgtggtatcaccagctatgtctccagctactgtatctcctgggtaagtggaaaggtggtaatgaccatgcgtcgccgcctgtttggtcacatgatgggaatgccagttagtttctttgacaaacagagtacgggtacgctgttgagtcgtattacctacgattccgaacaggttgcttcttcttcttccggcgcactgattactgttgtgcgtgaaggtgcgagcatcatcggcctgttcatcatgatgttctattacagttggcaactgagcatcattttgattgtgctggcaccgattgttagcattgcgattcgcgttgtaagcaagcgttttcgcaacatcagtaaaaacatgcagaacaccatggggcaggtgaccaccagcgcagaacaaatgctgaagggccacaaagaagtattgattttcggtggtcaggaagtggaaacgaaacgctttgataaagtcagcaaccgaatgcgtcttcaggggatgaaaatggttagtgcctcttccatctctgatccgatcattcagctgatcgcctctttggcgctggcgtttgttctgtatgcggcgagcttcccaagtgtcatggatagcctgactgccggtacgattaccgttgttttctctagtatgattgcactgatgcgtccgctgaaaagcctgaccaacgttaacgcccagttccagcgcggtatggcggcttgtcagacgctgtttaccattctggacagtgagcaggagaaagatgaaggtaagcgcgtgatcgagcgtgcgactggcgacgtggaattccgcaatgtcacctttacttatccgggacgtgacgtacctgcattgcgtaacatcaacctgaaaattccggcagggaagacggttgctctggttggacgctctggtagcggtaaaagtaccatcgccagcctgatcacgcgtttttacgatattgatgaaggcgaaatcctgatggatggtcacgatctgcgcgagtataccctggcgagcttacgtaaccaggttgctctggtgagccagaatgtccatctgtttaacgatacggttgctaacaacattgcttacgcacggactgaacagtacagccgtgagcaaattgaagaagcggcgcgtatggcctacgccatggacttcatcaataagatggataacggtctcgatacagtgattggtgaaaacggcgtgctgctctctggcggtcagcgtcagcgtattgctatcgctcgagccttgttgcgtgatagcccgattctgattctggacgaagctaccagcgctctggataccgaatccgaacgtgcgattcaggcggcactggatgagttgcagaaaaaccgtacctctctggtgattgcccaccgcttgtctaccattgaaaaggcagacgaaatcgtggtcgtcgaggatggtgtcattgtggaacgcggtacgcataacgatttgcttgagcaccgcggcgtttacgcgcaacttcacaaaatgcagtttggccaatgatcgaaaaaatctggtctggtgaatcccctttgtggcggctattgctgccactctcctggttgtatggcctggtgagtggcgcgatccgtctttgctataaactaaaactgaagcgcgcctggcgtgcccccgtaccggttgtcgtggttggtaatctcaccgcaggcggcaacggaaaaaccccggtcgttgtctggctggtggaacagttgcaacagcgcggtattcgcgtgggggtcgtaagccggggatatggtggtaaggctgaatcttatccgctgttattgagcgcagataccacaacagcacaggcgggtgatgaacctgtgttgatttatcaacgcactgatgcgcctgttgcggtttctcccgttcgttctgatgcggtaaaagccattctggcgcaacaccctgatgtgcagatcatcgtaaccgacgacggtttacagcattaccgtctggcgcgtgatgtggaaattgtcgttattgatggtgtgcgtcgctttggcaatggctggtggttgccggcggggccaatgcgtgagcgagcggggcgcttaaagagcgttgatgcggtaatcgtcaacggcggtgtccctcgcagcggtgaaatccccatgcatctgctgccgggtcaggcggtgaatttacgtaccggtacgcgttgtgacgttgctcagcttgaacatgtagtggcgatggcggggattgggcatccgccgcgcttttttgccacgctgaagatgtgtggcgtacaaccggaaaaatgtgtaccgctggccgatcatcagtctttgaaccatgcggatgtcagtgcgttggtaagcgccgggcaaacgctggtaatgactgaaaaagatgcggtgaaatgccgggcctttgcagaagaaaattggtggtatttgcctgtagacgcacagcttagtggtgatgaaccagcgaaactgcttacgcaactaaccttgctggcttctggcaactaattacgccgcggcagcgttcgattgatggagtcatgaatgagcctgccgcacctctcccttgctgatgcgcgtaatcttcaccttgccgcacaaggcctgttaaacaaaccccgccgtcgagcgagcttggaggatattccggcaacgatctcccgcatgtccttgctgcaaatcgataccatcaatattgttgcccgtagtccatatctggtgcttttcagtcgtctgggaaattatcctgcccagtggctggatgagtctctggcgcgtggcgaattaatggaatactgggcgcatgaagcctgctttatgccgcgtagcgactttcgtcttattcgccaccgcatgctggcacctgaaaaaatgggctggaaatacaaagacgcctggatgcaggaacatgaggcggaaattgcacagttaattcagcatattcatgataaggggccggtacgtagtgccgattttgagcatcctcgtaaaggtgcaagcggctggtgggaatggaagccgcataaacggcatctggaaggtttatttactgccggaaaggtgatggtgattgaacggcgcaacttccagcgcgtttatgatttaacccaccgtgtcatgcctgactgggatgatgagcgcgatctcgttagccaaacagaagcagaaatcatcatgctggataacagtgcgcgtagcctgggaatattccgcgaacagtggctggcagattactatcggctgaaacgtccggcactggcggcgtggcgcgaagcgagggctgaacagcagcaaatcattgctgtgcatgttgaaaaattgggcaatctttggctgcatgatgatttgctgccgctactcgagcgagcgctggccggaaagctcactgcaacgcacagcgcggtacttagcccttttgatcctgttgtctgggatcgcaaacgcgcagagcagctttttgattttagctaccggctggagtgctataccccagcgccgaaacgccagtatggctattttgttctgccgttattacatcgtgggcaattagttgggcgaatggatgccaaaatgcatcgccagacaggcatccttgaagttatctctctgtggttacaggaaggtattaaaccaacgacaacgctgcaaaaagggctacgtcaggcgattactgatttcgctaactggcagcaggcaacgcgggtgacattaggatgctgcccgcaaggcctctttactgattgccgcaccggctgggaaatagaccccgtcgcataaatgattatgataagatttatgcattcataacccgatccatctggaggaactatggatcatcgtctgcttgaaatcattgcctgcccggtttgcaacggaaaactttggtataaccaggaaaaacaagagcttatttgcaaactggacaacctcgctttcccgctgcgtgatggcattccagtgttgctggaaacggaagcccgcgtgctgactgctgatgagagtaaaagttgatgtaaactgctgatgagagtaaatcatgagttttgtggtcattattcccgcgcgctacgcgtccacgcgtctgcccggtaaaccattggttgatattaacggcaaacccatgattgttcatgttcttgaacgcgcgcgtgaaagtggtgccgagcgcatcatcgtggcaaccgatcatgaggatgttgcccgcgccgttgaagccgctggcggtgaagtatgtatgacgcgcgccgatcatcagagtggaacagaacgtctggcggaagttgtcgaaaaatgcgcattcagcgacgacacggtgatcgttaatgtgcagggtgatgaaccgatgatccctgcgacaatcattcgtcaggttgctgataacctcgctcagcgtcaggtgggtatggcgactctggcggtgccaatccacaatgcggaagaagcgtttaacccgaatgcggtgaaagtggttctcgacgctgaagggtatgcactgtacttctctcgcgccaccattccttgggatcgtgatcgttttgcagaaggccttgaaaccgttggcgataacttcctgcgtcatcttggtatttatggctaccgtgcaggctttatccgtcgttacgtcaactggcagccaagtccgttagaacacatcgaaatgttagagcagcttcgtgttctgtggtacggcgaaaaaatccatgttgctgttgctcaggaagttcctggcacaggtgtggatacccctgaagatcttgagcgcgttcgcgctgaaatgcgctaatttcacttcacgacacttcagccaattttgggaggagtgtcgtaccgttacgattttcctcaatttttcttttcaacaattgatctcattcaggtgacatcttttatattggcgctcattatgaaagcagtagcttttatgagggtaatctgaatggaacagctgcgtgccgaattaagccatttactgggcgaaaaactcagtcgtattgagtgcgtcaatgaaaaagcggatacggcgttgtgggctttgtatgacagccagggaaacccaatgccgttaatggcaagaagctttagtacgcccggaaaagcccgacaactggcatggaaaaccaccatgctggcaagaagtgggactgtccgtatgccgactatttatggtgtgatgacgcatgaagaacaccccggccccgatgtcctgctactggagcggatgcgtggtgttagcgtggaggcaccagcccgaacaccagaacgctgggaacaactcaaagaccaaatcgttgaagccttactggcctggcaccgtcaggacagtcgcggttgcgtcggcgcggtcgacaatactcaggaaaatttctggcccagttggtaccggcaacatgttgaagtgctatggaccacgctcaatcagttcaataacaccggtctgacgatgcaggataagcggatcctgtttcgcactcgcgaatgtctcccggcattatttgaaggctttaacgacaattgtgtgctgattcacggtaacttctgtttacgcagcatgttgaaagatagccgcagcgatcagttactggcgatggtcgggccgggactaatgctttgggcaccgcgagaatacgaactgttccgactaatggataattctctggcggaagatttgctctggagttacctgcaacgcgcgccagtggcggagagcttcatctggcggcgttggttgtatgtgttatgggatgaagttgcgcaactggttaataccggacgatttagtcggcgcaacttcgatctggcaagtaaaagtctcttgccgtggctcgcctgatcactcttgccgtggctcgccactgctaccttttagccactgccagatacggccaagcgtttcatagccaacacgatcgctatgcatcaaccagaccggagaagggattgcccgttcccacgggttaagcgggctgtcgatggccaactgattcgccggggctggtagcggatttaacccttcctgctgaaaaaagatcatcgcccgcggcagatgacttgcggaggtcaccagcaggaaaggggcgtcaccaatcgcctgtttcactgctgcagcttcttcttcggtatcttttggcaaatccagggtgataatttgctcgcgcggcacgcccaggctttgcgcaactctggcacctacttccgctgtactcaccgtattggtttttgctacgcctcccgtgaagatcagtttacttcccggattttcgcgccataagcgaataccttcattcaggcgtggcagactgttattgattaaattagagctcggtgcccactgcgggttccaggtataaccacctccgagcaccacgatatagtccactttttggctattattccatgtcggataggtgctttcgatgggacgcagcaggcggtcggctaccggttgcaaactcaataacaagagcgccagccacccaatgctaataaaaatcttcccggttttttgaaaacggctaaaccacagcagcgccaggccagcgccaataatcaacaacatcagcggaagtggcagcaacatattgccaatcacttttttcagtgtaaaaagcatcctttctggttccttttttaaccatatagcaagggatcgccagcgatattacaccagacgggttcattctcgccgtggctgtgacaaaatagcgtctttatcagaaaacgtcttagccaaccggtggagaaagcaatgcaggatcgcaattttgatgatattgcggaaaagttttcccgtaacatttacggcaccaccaaagggcagcttcgacaggctattctgtggcaggatctcgatcgcgtgctggcggaaatgggcccgcaaaaactgcgtgtgctggatgctggcggtggagaagggcagaccgcaatcaaaatggccgagcgtgggcatcaggtcattttatgcgatctttctgcgcagatgatcgaccgcgcaaaacaggcggcagaagcaaaaggtgtgagcgacaacatgcaatttatacattgcgccgctcaggatgttgctagccatttggaaacgcccgttgatctgatattgttccatgcggtgctcgagtgggtggctgatccccgcagcgtattgcagaccctctggagtgtgttgcgtccaggcggcgtgttgagcttaatgttctacaatgcgcatggtttgttgatgcataacatggtcgccgggaattttgattacgtgcaggcgggaatgccgaaaaagaaaaaacggacgcttagcccagattatccacgcgacccggcgcaggtttatctgtggctggaagaagctggttggcaaattatgggtaagacaggcgttcgcgtgtttcatgattatctgcgcgagaaacaccagcagcgcgactgctatgaagcattacttgaattagaaacgcgttattgccgtcaggaaccgtatattaccctggggcgttatattcatgtcaccgcgcgcaaaccgcagagcaaggataaagtatgagtgaattttcccagacagtccccgaactggttgcctgggccagaaaaaatgacttctccatcagcctgccggtagaccgactctcttttctgctggcggttgccacgctgaacggcgagcgtctggatggtgagatgagtgaaggcgagctggtggatgcattccgccatgtgagtgatgcgtttgagcaaaccagcgaaaccatcggcgtgcgcgccaataacgcgatcaacgacatggtgcgtcaacgtctgctgaaccgctttaccagcgagcaggcggaagggaacgcaatttaccgtctgacgccgctcggcatcggcattactgactactacatccgtcagcgcgagttttctacgctgcgtctttctatgcagttgagcattgtggcgggtgagctcaaacgcgcagcagatgccgccgaagagggcggtgatgaatttcactggcaccgtaatgtctatgcgccactgaaatatagcgtagcagaaattttcgacagtatcgacctgacgcaacgtctgatggacgaacagcagcagcaggtgaaggacgatatcgcccagttgctgaacaaagactggcgggcggcgatttccagctgtgaattgttgcttagcgaaacttccggaacgctgcgtgaattgcaggatacgctggaagcggcaggcgacaaattgcaggctaatctgttgcgcattcaggatgcgacgatgacccatgacgatctgcatttcgtcgatcgtctggtgttcgatctgcagagcaaactcgatcgtattatcagttggggccagcaatccatcgacttgtggattggctacgaccgccacgtacacaaatttattcgtaccgcgatcgatatggataaaaaccgcgtctttgctcagcggttacgtcagagcgtacaaacctattttgatgagccgtgggcgctaacttatgccaatgccgatcgtctgctggatatgcgtgacgaagagatggcactgcgcgatgaagaagtgactggggaacttcctgaggatctggaatacgaagagtttaacgagatccgcgaacagctggcggcgatcatcgaagaacaacttgccgtgtacaaaaccagacaagtgccgctggatcttggtctggtggtacgcgaatatctgagtcagtatccgcgtgcacgtcactttgacgttgcgcgtattgttattgatcaggcggtacgtcttggcgtagcgcaagcagatttcaccggactgccagcgaaatggcagccgattaatgattacggagccaaggtacaggcgcatgtcatcgacaaatattgaacaagtgatgccggttaagctggcgcaggcgctggcgaatccgttatttccggcgctggacagcgccttacgtagtggacgccatattggcctcgacgaactggataatcatgcattcctgatggattttcaggaatatctggaagagttttacgcgcgttataacgttgagcttattcgcgcaccagaagggttcttctatttacgcccacgttccaccacgctgatccctcgttccgtcttgagcgaactggatatgatggtcgggaaaatcctctgttatctctatctcagcccggaacggctggcgaatgaggggattttcacccagcaggaactgtacgacgaactgctcaccctggccgatgaagcaaaactgctgaaactggtgaacaaccgtagtaccggtagtgacgttgaccgtcagaagttgcaggagaaagtacgttctagcctcaaccgtctgcgtcgtttaggcatggtgtggtttatgggccacgacagcagcaagtttcgcattaccgaaagcgtgttccgcttcggagccgatgtgcgtgctggcgacgatccccgtgaagcacagcgtcgcctgattcgtgatggcgaagcaatgccgattgaaaatcatctgcaactcaacgatgaaaccgaagagaatcagccagatagcggagaggaagaataatgattgaacgcggtaaatttcgcagtctgacgctgattaactggaacggcttttttgcccgaacttttgaccttgacgagctggtcacgacgctttctggcggtaacggggcgggtaaatccaccaccatggcggcgttcgttacggcgctgatccccgacctgaccctgctgcatttccgtaacactacggaagccggggccaccagcggtagccgcgataaaggtctgcacggtaagctgaaagcgggtgtctgttatagcatgctcgacaccattaacagccgccaccagcgcgtggtggtcggtgtgcgtctgcaacaggttgccggacgcgatcgtaaagtggatatcaagccgtttgccattcagggactgccgatgagcgtgcagccgacacagctggtgaccgaaaccctgaacgaacgccaggcgcgcgtgctgccgcttaacgagctgaaagacaagctcgaggcgatggaaggcgtgcagtttaaacagttcaactccattactgattaccacagcctgatgttcgatctgggcatcatcgcgcgtcgtctgcgctccgcatctgaccgtagcaaattctatcgtctgatcgaagctagcctgtatggcgggatctccagtgccattacccgttctctgcgcgactacctgttgccagaaaacagcggcgtgcgtaaagcgttccaggacatggaagcggcgctgcgtgaaaaccgtatgacgctggaagcgattcgtgtcacccagagcgaccgcgacctgtttaagcatctgatcagcgaagccaccaactacgtggcggcggactacatgcgtcacgccaacgagcgccgtgtccatctcgacaaagccctggagtttcgtcgcgagctacatactagccgtcagcaactggcggctgagcagtacaaacacgtcgatatggcgcgtgagctggcagagcacaacggtgccgaaggcgatctggaagcggattatcaggcggccagtgatcacctgaacctggtgcaaaccgcactgcgtcagcaggagaagatcgaacgctacgaagcggatctcgatgagctgcagatccgtctggaagagcaaaatgaagtggtggcagaagccatcgaacgccagcaagagaatgaggctcgtgcggaagctgccgaactggaagtggacgagctgaaaagccagcttgctgactaccagcaggcgctggacgtccagcaaacgcgcgcgatccagtataaccaggcgattgctgcgcttaatcgtgccaaagaactgtgccatctgccggacttaaccgccgactgcgccgccgaatggctggaaaccttccaggcgaaagagctggaagcgactgaaaaaatgctctctcttgagcagaaaatgagcatggcgcaaaccgcgcacagccagtttgagcaggcttatcagctggtggtggcaatcaacggcccactggcgcgtaacgaggcgtgggatgtcgctcgcgaactattgcgcgaaggggtcgatcagcgtcacctggcagagcaggttcagccgctgcggatgcgattaagcgaactggaacagcgtctacgcgagcagcaagaagctgagcgtctgctggcagatttctgcaaacgtcagggcaagaattttgatatcgacgaactggaagccctgcatcaggaactggaagcacgcattgcctctctttccgatagcgtgtctaacgcccgtgaagagcgcatggcactgcgccaggagcaggaacagctgcagtctcgcattcagagtttgatgcagcgtgcgccggtttggctggcagcgcaaaacagtctcaaccagttgagcgaacagtgcggcgaagagtttacctccagccaggacgtcaccgaatatctgcaacagttgctggagcgtgagcgagaggcgattgttgaacgcgatgaagtgggcgcgcgcaaaaacgccgtcgatgaagagatcgaacgtttaagccagcctggcggctctgaagatcagcgtctgaacgcgctggcggagcgttttggtggtgtgctgctgagtgaaatttatgacgacgttagcctggaagatgcgccgtacttcagtgcgctgtatggcccgagtcgccacgccatcgtggtgccagatctgagtcaggtaactgaacacctggaaggcttgaccgattgcccggaagatctctatctgatcgaaggagatccgcagagtttcgatgacagcgtgttcagcgttgatgagctggaaaaagcggtagtggtgaaaatcgccgatcgtcagtggcgttatagtcgtttcccggaagtgccgctgtttggtcgtgctgcgcgtgaaagccgtattgaaagcctccatgccgagcgtgaagtgctttccgaacgcttcgccacgctctcctttgatgtacagaaaactcagcgtctgcatcaggcgttcagccgctttatcggcagtcatctggcggttgcgtttgagtctgacccggaagcagaaatccgtcaactgaacagccgtcgcgtcgaactggagcgggcgttaagtaatcatgaaaatgataaccagcagcagcgtattcagtttgagcaggcgaaagagggcgttacggcgctgaaccgcattctgccgcgtctcaacctgttggctgatgacagcctggcggatcgcgtcgatgaaatccgcgaacgtctggatgaagcccaggaagccgcgcgttttgttcagcagtttggcaatcaactggcgaaactggaaccgattgttagcgtattgcagagcgacccggaacagttcgaacagttaaaagaagattacgcgtactctcagcagatgcagcgcgatgcccgtcagcaggcgtttgccctgacggaagtggtgcagcgtcgtgcgcactttagctattctgacagcgcagaaatgcttagcggtaacagcgatctcaacgaaaaactgcgtgaacgtctggaacaggcggaagcggagcgtacccgcgctcgcgaagcgttgcgcggtcacgcagcgcagttgagtcagtacaaccaggtgctggctagcctgaaaagttcttacgacaccaaaaaagagctactcaacgatctgcaacgtgaattgcaggatatcggcgtgcgtgctgatagcggggcagaagagcgggcgcgtattcgccgtgacgagctgcatgcgcaactgagcaataaccgtagtcgccgcaatcaactggaaaaagcgcttaccttctgcgaagcggagatggacaacctgacccgcaaactgcgcaagctggagcgggattactttgagatgcgcgagcaggtagtgaccgccaaagcgggctggtgtgcggtgatgcgcatggtgaaagataacggcgttgagcgccgcttacaccgtcgtgagctggcttatctctccgctgatgatttgcgttccatgagcgataaggcgttaggtgcgctgcgtctggcggtggcggataacgaacatctgcgcgacgtgctgcgcatgagcgaagatccgaaacgtccggagcgtaaaattcagttcttcgtggcggtttatcagcatctgcgtgaacgtattcgtcaggatattattcgtaccgatgatccggtggaagctatcgaacagatggagattgaacttagccgtctgaccgaagaattaacctcccgtgaacagaaactggcgatcagttcccgcagcgtggcgaacatcattcgcaaaaccattcagcgcgagcagaaccgtatccgtatgctcaaccaggggttgcagaacgtaagctttggtcaggtgaacagcgtgcgtctcaacgtgaacgtgcgtgaaacgcacgccatgctactggatgtgctctctgaacagcacgagcagcatcaggatctgtttaacagcaaccgtttgaccttcagcgaagcgctggcgaaactgtatcaacgtcttaacccgcagattgatatggggcagcgcacgccgcagaccatcggtgaagaactgctggattaccgcaactatctggaaatggaagttgaggttaaccgtggttccgatggctggctgcgcgcagagtctggtgcattgagcaccggtgaggcgattggtaccggtatgagcattctggtgatggtggtacaaagctgggaagatgaatctcgccgcctgcgcggtaaagatatctctccttgccgcctgctgttcctcgatgaagcagcgcgactggatgctcgttctatcgccacgctgtttgaattgtgtgagcgtttgcaaatgcaactcatcatcgcagcgccggaaaatatcagcccggagaaaggcaccacctataaactggtgcgtaaagtcttccagaataccgaacacgttcatgtcgtcggcctgcgaggatttgcgccgcaactccctgaaacgcttccaggaactgacgaagcgccttctcaggcgagttaaaattaaggcggcagcaatgccgccttttctttttccgaaaactccgtttctgcactaaaaaagtggcacattacggcgcgcttttctttaaacttctttacattaggttatgtaaaaacgtatcggcgtttatatactgaagataagcctgatgagtaacaggcttgctcgtcatactttcgtgagtattggcgttgtacaggcaagtcgtaaaataacagcctggctattcagagtatgataaaaacagggggcaagggatgttgcttaatatgatgtgtggtcgtcagctgagcgcaatcagtttgtgcctggccgtaacattcgctccactgttcaatgcgcaggccgatgagcctgaagtaatccctggcgacagcccggtggctgtcagtgaacagggcgaggcactgccgcaggcgcaagccacggcaataatggcggggatccagccattgcctgaaggtgcggcagaaaaagcccgcacgcaaatcgaatctcaattacccgcaggttacaagccggtttatcttaaccagcttcaactgttgtatgccgcacgcgatatgcaacccatgtgggaaaaccgtgatgctgttaaagccttccagcaacagctggcagaggtggcgattgccggtttccagccgcagtttaataaatgggtagagttactgaccgatcctggtgttaacgggatggcacgcgacgtggtgctctctgatgcgatgatgggctatctccatttcattgcaaatattccggtcaaaggcactcgctggctatatagcagtaaaccttatgcacttgcaacgccgccgctcagcgtgattaaccaatggcagctggcgctggataaaggtcaattgcctacgtttgttgcaggactggcaccgcagcatccgcaatatgcggcgatgcatgaaagcttactggccttactctgtgacaccaaaccgtggccccaactgaccggcaaagcaacgttgcgcccagggcagtggagtaacgacgtaccggcgttgcgcgaaatattgcaacgcacaggcatgttggacggggggccgaaaattactctacctggcgatgacacgccaactgacgcggtagtcagcccatccgctgttactgttgaaacagcagaaactaagccgatggataagcaaacgacgtctcgtagtaaacctgcgcctgccgttcgcgccgcctacgataatgaactggtggaagccgttaaacgttttcaggcatggcaaggattgggggcagatggtgctattggcccggcaacacgtgactggttaaacgtaacgcccgcccagcgtgctggtgtgttggctctcaacatccagcgattgcgcttgctgccaacagagctttctaccgggatcatggttaacattccggcctatagcctggtctactatcagaacggcaatcaggtgctggatagccgagtcattgtcggtcgccccgatcgcaaaacgccgatgatgagcagtgcccttaacaacgtagtggtaaacccgccgtggaacgtacctccaactctggcacgcaaagatattctgccaaaagtgcgcaacgatccgggatatctcgaaagccatggctatacggtgatgcgcggctggaacagcagagaagcgattgacccatggcaggttgactggtctacaatcacggccagcaatttaccgttccgcttccagcaggctccaggcccacggaacagcctggggcgctataaattcaatatgccgagtagtgaggccatttatttgcatgacacgccgaaccacaatctgttcaagcgtgatacacgcgcattgagcagtggctgtgtacgagtgaataaagcttccgatctggcgaatatgctgttgcaggatgcaggctggaatgacaaacgtatttctgatgcgctgaagcagggtgatacacgttacgtcaatattcggcagagcattccggtgaatctctactacctgacggcctttgttggtgcagatggtcgtacccagtatcgtacagatatttacaattatgatctgcctgcgcgatccagcagccaaatcgtaagcaaagcggaacaattaatcaggtaaatgaagtagttcggggaaatcagttgtcgtaataattagcatgattgggggcgattctctgcagcccccgtcactgctggggttgagtcatcttgacgtctgctttacgggcggttaaggtgcctcttgtgcgccagaagtgcatataaacgataacattgacctgtagacttgattatcatggacaaattcgacgctaatcgccgcaaattgctggcgcttggtggcgttgcactcggtgccgccatcctgccgacccctgcgtttgcaacactctctaccccacgcccgcgcattttgacactcaataatcttcataccggagagagtatcaaagcggagtttttcgatggcagaggctatattcaggaagaattggcaaaacttaaccattttttccgcgattaccgcgcgaacaaaataaagtccatcgacccaggattattcgaccagttgtatcgcctgcaagggttgttaggcacgcgcaaaccggtgcaactcatttccggttatcgttctattgataccaacaatgaactacgcgcccgcagccgtggagtagcgaagaaaagctatcacactaaaggccaggcgatggatttccatattgaaggtatcgcgttaagcaatattcgcaaagccgcgttatctatgcgcgcaggtggtgtaggatattatccacgtagtaactttgtgcatattgataccgggccagcacggcactggtaataattgcttaacgaaacaggggcagtatgaactatcgtattattccggtcaccgcattctcccagaactgtagtttaatctggtgtgaacaaacccgtctggccgcactggtcgatcctggcggcgatgcggaaaaaatcaaacaggaagttgatgacagcggcctgacactgatgcagatcctgctgacgcatggtcatctggaccacgttggcgcagcggcggaactggcgcaacattacggcgtgccggttttcggcccggaaaaagaagatgagttctggctgcaaggcttgcctgcgcaaagtcgtatgtttggtctggaagagtgccagccgctgacgccagatcgttggctgaacgaaggcgataccatcagcatagggaatgtgactttacaggtgttacattgccctgggcatacgccgggtcatgtcgtgttttttgatgatcgggcaaagctgctgatttctggcgatgttattttcaaaggcggagtagggcgcagtgacttcccgcgtggcgatcataatcaactgatttctagtatcaaagataaattgctgccactgggggatgacgtgatatttattccgggtcacggaccattatccacacttggttatgaacgcctgcataatcccttcctgcaagacgaaatgcccgtctggtaaggcacataaaaaagcccgcttttaatgctggcctggatttctggcaaagtgcgctttgtttatgccggatgcggcacgagcgccttatccggcctacaaaatcgtgcaaattcaaaatattgcaggggacgcgtaggcctgataagcgtagcgcatcaggcaatgttgcgtttgtcatcagtctcagcccgcttttcagcgggcttcattgtttttaatgcttacagcactgccacaatcgcttcgcacagcggagccatgttatctggtgtcatcccggccacatttacgcgaccagaagcaaccgcatatacgccaaactcttcgcgcagacgcagcacttgttcttttgtcaggccactgaaggagaacatgccgttctgtttgatgataaagctgaagtcgcggtttgcgcctttttcctgcagcgtattgacgaacaactgacgcatacgctgaatacgctggcgcatatcagtcagctcttgttcccaaatcgcacgtaacgcatcgttgctcaggatggtggcaacaacagaagcgccgtgtgctggtgggttagagtagttagcgcgaatcgccgctttcatttggctgaatgcgcgatcaacggtttcactgtcggcagcaaccagagtacaagcgccaacacgctcgttgtacaggccaaagtttttagagtaggaactggcaacaatcagctctttatgcatagccgcgaaagcgcgcagtccttcagcatcttcttccagaccacgggcaaaaccctggtaagcgaagtcaaacagcggtaaccagcctttctcaacggagagttgtgccagtgtttgccattgttccagcgtagggtcgataccggttgggttatggcagcagccatggaacagcactacgtcgccagcctgagcttcattcaggctgttaatcagtgcatcgaagtcaagagtgtgattttccgcatcataataagcgtattcacgaacttccagacctgcagagttaaagacgctcttatggttcggccagcttgggttgctcacccacacacgcttaacgctggtattttttgccaggaaatcggcagccacgcgtagtgcgccagtgccccccggagtctgtgccgtgcgagcacgtttgtcattgatcagggcgctacctttaccaaacagcagttcctgagtgcagcgaccaaattcagggatgccgtcaatgccgaggtaatttttggtggtttcattttcgagcagatactgttcagcctttttcacgctggtcagtaccggggttttgcccgtctcatctttatagacaccaatcccgaggttaattttgccgggacgttcatcggcacgaaacagatcggccaggcccagaatcgggtcggcaggagcggcggtaatgttctcaaacatgacgaggttccattatggttacagaagggaagtccgctatcagggtaacgggagatttacaaaattccaactattactgatgaaaacgcaggctgtttttgcaagacgtgagattgctctggaaggtataaaaaaaacaggaccaaagtcctgttttttcggcatttaacaaagaggtgtgctattagaactggtaaacgatacccacagcaacggtgtcgtcactacctacgcccagtttgttgtcagaatcgatctggttgatgatgtagtcaacataggtggacatgtttttgttgaagtagtaggttgcgcccacttcaaagtagttcaccagatcaacatcaccgataccttctacgtctttcgctttagatttggtgtaagcgatggacggacgcagaccgaaatcgaactggtattgcgcaactaacagaacgtcttgcgttttgttggcgaagccgctggtgtttgtaaatttattagtgatcggcgtagcgttacgggtttcaccgtagttcgctgccaggtagatgttgttcgcgtcgtacttcagaccagtagcccactgttcagcttttttaccgttgccaagaggttgagcttcttgcaggttggtacggtcagctgcaccataagcaccaacgataccaaagccttcgtattcgtagctgatagaaccgccaacaccgtcgccgttagaacggcgtgcagtgtcacgctcgtttttacccaggtactgaacagcgaagttcaggccatcaaccagaccaaagaagttggagttacgataggtagcaacgccgccaacacgaccaacgaagaagtcatcgctgtatgcagtatcaccaccaaattctggcagcatatcggtgtaacccagtgcatcataaaccacaccgtagttacggccgtaatcgaaagaaccaacgtcagcgtatttaagacccgcgaatgccagacgcgttttgttaccagtttgagcgtcagcgccttcagagttgttaccctggaagttatattcccactgaccataaccggtcagatcggaattgatttgagtttcccctttaaaaccaagacgggcataggtcatgtcgccattgccaccgtaactgttttcaccgttacccttggaaaaataatgcagaccaacagctttaccgtacagatctactttgttgccatctttgttatagatttctgcagcgtttgcagtacctgctactaacagagcagggacgatcactgccagaatattgcgcttcatcattatttattaccctcatggttttttttatgacacctgccactgccgtcaataagttctgtcaataaaaatttacggaactattgatgagagtttggtgtctttatgtgtctgcaggcatctttccattcaaactaacgtttcgctaccgtgaaagtgctacaaagataaagatttggtttcaaaaagaaaaaatatgtaaccaaaagtaaaatttaaggaactttgtgaacaccgtcatatttccatagagacgtgatgatatttacagcaattttaatctatttatatgatttccttatatttaaattaactaaacggaaattttgtttctgatggaaactttatcgacctggcacaaaatcttctttcagacatccagaatgccaaaaaatagtatgaaaattgtgctattagctaagaaaaaactaatccgcaataagaatgcggattagtttttgcgcgtaaatgttgcaatgtaatattccgtaacaggatgatcgttatggcggggttgcaaatagattgcttgacttaacaaacagataacttgacagaaaagataaaaaaagagccagcgggcgctggctcttgaagacgctaaattagaagctggcgttacgcggagtacgtgggaacggaatcacatcacgtacgttttgcacgccagttacgtaagcaatcagacgttcaaaaccaagaccgaaaccactatgcggaacagtaccgtagcgacgcagatcgcgataccaccagtaatcttctttattcaggcccatttccagcatacgctcgtccagcacgtccagacgttcttcacgctgggagccaccaatgatctcaccgatgcccggagccagaacgtccatagccgcaacggttttaccgtcttcgttaaggcgcatatagaacgctttaatatctttcggatagtttttaaccactaccggtgctttaaagtgttcttccgccagataacgctcatgctcagaagagagatcgactccccagtaaaccgggttttcaaacttcctgccgcagttttcgagaatggtcactgcgtcggtataatccacctgcgcaaaatcggcttcaatgaagcgttccagacgactaacggcatctttatctacgcgttcagcgaagaatttcatgtcgtcagcgcgttcttcgagaaccgctttgaagacatatttcagcatggcttcagccagacccgcaatatcgttcaggttagcaaacgccacttccggctccagcatccagaattccgccaggtgacggctggtgttggagttttcagcacggaaagtcgggccgaaggtataaattttggacaatgcgcaagcgtaggtttcgccgttcaactggccagatacggtcaggaaagactctttaccaaagaagtctttgtcgaaatccactttgccctgatcgttacgcggcaggttttccagatccagcgtagaaacgcggaacatttcgcctgcaccttcggtatcagatgcggtaatcagactcgtactaacccagaagaatccctgctcgttaaagaagcgatgcagcgcctgcgccagcgtatggcgaacgcgcgcgacggcaccaatcaggtttgtgcgcggacgcaggtgagcgacttcacgcagatactcaatgctgtggcgttttgccgccatcgggtaagtgtctggatcttcaacccaaccagcaacttcaaccttgctggcctgaatttcaaattgttgcccctggcccgggctcgccacgactttacccgtcacaatgacgctgcagccggtggtcagacgcaggacgtcttcattgtaattgggcagagaattattgatgacagcctgtacaggatcaaagcaggaaccgtcataaacggcgaggaaggagatgccagctttactatctcggcgggtacgtacccatccgcgcacggtgacttcgctgtcaacggctacacggccctggagtacgtcggctacaggcacaacgctcataatattctctctgttaatagtcggaaaaataaacacttgtccacccgtaaatggggggatacctatgttacctggcatctgcaatcagacaagcagaattcgcaaatgcagcgaaagatttcggaattaaaggtaaaaaaagggagccgattagctccctgatgatattaactggcttttttaatatgcggaaggtcgaacgctttgcgcagcgcccgaacaaacgctttatcatggcagatagttttgccagggctgtcagaaagtttcgccaccggtttaccgttacactctaccaacttaatgacaatattcaggggttttacctgggggatatcgcaggtcaggcgagtcccaataccaaaacttaattgcacgcgggaagagaagtggcggtatagctcaaccgctttgcgtaaatccagattgtcagagaaaaccagcgttttactctgtggatcaattcccagcttttcataatgtgcaatggctttttcaccccattcaaccgggtcgccagagtcatgacgcaggccctgataccgactagcgaactcgacaccgaaatcacgcaggaaagcatccatagtgatgcagtcggttaatgcaatgccaagttggtcgggatactcttccagccaggcagcaagtgcagctcgctggctgttggctagatccgggctgatttgctgatgtgcctggaaccattcgtgtgcctgtgttcccatcggcgtgagggaaagccgacgcgccagatcgtagttgctggtgcccacaaaccaggattcctgttgcagacgcttaacgatggtttcttgtacttcgcgagaaaaacggcgacgggtgccaaaatccatcagatggaagcggctcatatcaagaccggcggttaacgcgctgaagtcgactaatttgctttccagcgtgtcgagggcttgcgcaacgtcggcctgcggactgcgatagcgatgtaccatttcactgataaccgccagcaaaggaacttcccagaggatgacttcacgccacgggccgcttaaacgaatatccagcttgccattatcgttggacacggtgacttgttccgggttaaagcggaactcgcgtaaccagttaagatagtcggccttaaagaaaggcagggcagaaagccactgatattcatcatcctgcaggcgcaggtgctgcatcgcctgaacctgttcacgaatagcatcggcataaatacccagcagatcgtcacctcggcaacgaaactccgccgcgacatgcacatcgtaatagtgatgaaacacggcttgctgcatatgcaacttataagcatctgtatccagcaagctgtgcagaacaggagaagcgaattgtgtcataggtgcgcagtagcgtcctcgtacaggagcgtttagtacaataaacatcttcaggaactgctggagtataccttgtttcgcaatttattgaaccccgatcacaccatatgccacctttctggtcgatggcattacgcggtgtatgttataaaaatgtagcaataaaggcgtttgtacctgaaaagatgaagattctgcatagcgcgatttacgcaacaggaatagactgaacaccagactctataaaagatgctaaaggttatttatgactcaacagccacaagccaaataccgtcacgattatcgtgcgccggattaccagattactgatattgacttgacctttgacctcgacgcgcaaaagacggtcgttaccgcggtcagccaggctgtccgtcatggtgcaagtgatgctccccttcgtctcaacggcgaagacctcaaactggtttctgttcatattaatgatgagccgtggaccgcctggaaagaagaagagggcgcactggttatcagtaatttgccggagcgttttacgcttaagatcattaatgaaataagcccggcggcgaataccgcgctggaagggctttatcagagtggcgatgcgctttgcacccagtgtgaagccgaaggtttccgccatattacgtattatctcgaccgcccggacgtgctggcgcgttttaccaccaaaattattgccgataaaatcaaatatcccttcctgctttccaatggtaaccgcgttgcgcaaggcgaactggaaaacggacgccattgggtacagtggcaggacccgttcccgaaaccgtgctacctgtttgcgctggtggcaggcgactttgatgtactgcgcgatacctttaccacgcgttctggtcgcgaagtagcactggagctgtacgtcgatcgcggcaaccttgatcgcgcgccgtgggcgatgaccagcctgaaaaactccatgaaatgggatgaagaacgctttggcctggagtatgacctcgacatctatatgatcgtcgcggtggatttcttcaatatgggcgcaatggagaataaggggctgaatatctttaactccaaatatgtgctggcccgcaccgacaccgccaccgacaaagattacctcgatattgaacgcgttatcggccatgaatatttccataactggaccggtaaccgagtgacctgtcgcgactggttccagctcagcctgaaagaaggtttaaccgtcttccgcgatcaggagttcagctctgaccttggttcccgcgcagttaaccgcatcaataatgtacgcaccatgcgcggattgcagtttgcagaagacgccagcccgatggcgcacccgatccgcccggatatggtcattgagatgaacaacttctacaccctgaccgtttacgagaagggcgcggaagtgattcgcatgatccacaccctgcttggcgaagaaaacttccagaaagggatgcagctttatttcgagcgtcatgatggtagtgcagcgacctgtgacgactttgtgcaggcgatggaagatgcgagcaatgtcgatctctcccatttccgccgttggtacagccagtccggtacaccgattgtgaccgtcaaagacgactacaatccggaaaccgagcagtacaccctgaccatcagccagcgcacgccagccacgccggatcaggcagaaaaacagccgctgcatattccgtttgccatcgaactgtatgataacgaaggcaaagtgatcccgttgcagaaaggcggtcatccggtgaattccgtgctgaacgtcactcaggcggaacagacctttgtctttgataatgtctacttccagccggtgcctgcgctgctgtgcgaattctctgcgccagtgaaactggaatataagtggagcgatcagcaactgaccttcctgatgcgtcatgcgcgtaatgatttctcccgctgggatgcggcgcaaagtttgctggcaacctacatcaagctgaacgtcgcgcgtcatcagcaaggtcagccgctgtctctgccggtgcatgtggctgatgctttccgcgcggtactgcttgatgagaagattgatccagcgctggcggcagaaatcctgacgctgccttctgtcaatgaaatggctgaattgttcgatatcatcgacccgattgctattgccgaagtacgcgaagcactcactcgtactctggcgactgaactggcggatgagctactggctatttacaacgcgaattaccagagcgagtaccgtgttgagcatgaagatattgcaaaacgcactctgcgtaatgcctgcctgcgtttcctcgcttttggtgaaacgcatctggctgatgtgctggtgagcaagcagttccacgaagcaaacaatatgactgatgcgctggcggcgctttctgcggcggttgccgcacagctgccttgccgtgacgcgctgatgcaggagtacgacgacaagtggcatcagaacggtctggtgatggataaatggtttatcctgcaagccaccagcccggcggcgaatgtgctggagacggtgcgcggcctgttgcagcatcgcagttttaccatgagcaacccgaaccgtattcgtagcttgattggcgcgtttgcgggcagcaatccggcagcgttccatgccgaagatggcagcggttacctgttcctggtggaaatgcttaccgacctcaacagccgtaacccgcaggtggctagtcgtctgattgaaccgctgattcgcctgaaacgttacgatgccaaacgtcaggagaaaatgcgcgcggcgctggaacagttgaaagggctggaaaatctctctggcgatctgtacgagaagataactaaagcactggcttgataaataaccgaatggcggcaatagcgccgccattcggggaatttacccctgttttctcaggcgagtttcagattcaccacgttgcatcacccgttgcaacacctccgcttccagctccgctaatcgcacgctccctaatcgacgcggacgggggatatccactgtcaaatccagaccaatttttccctcttcaattaacagcacccggtcagccatcgctaccgcttcgctcacatcatgcgtcaccaacagtacggtaaagccgtgctcctgccaaagactcacaatcaaatcctgcatctcgagtcgcgttaaggcgtccagcgccccgagcggttcatcaagcaacaataatcccggtcgatgaatcaacgctcttgccagcgccactcgctgtttctgcccgccagaaagtgcggcaggccattcccctgcgcgattctccagtcctaccgcagccaacgctcgacgtgcggcatcgcgccactggcctttaaggcctaacccaacgttatcaatcacgcttttccacggtagcagacgcgcatcctgaaacatcattcgcgtgtcttcctgaatttcagccagcggtgtggtgcccgctaacacatcgcctgcggttggcgtttccagacctgccagcaggcgcagcagggtacttttgccaccaccgctgcggcccaccaccgccacaaactgacctgccggaatatgtaaatccagttggttcaggacgatattttccgcgtaatgtttgcttactgcattgagcaacaatggcgtgccctggttcagacgagcagtattcataccgtggcctccttcaaatgataagccgggttccagcgcaaccagaggcgctctaacagctgcgcgctgacgtcagccagtttgccgagcagggcgtaaagaataatagcgactaccaccacgtccgtttgcaaaaacccccgcgcattcatcgccagataaccaatgccactattggcagaaatggtttcggcaacaatcagcgtcagccacatcaggcccaacgcaaaacgcacgccgaccataatactgggcagggcaccaggcaggatcacatggataaacagcggtatgccggataatccatagctacgcgccatctccaccaacccgcgatcgatattacggatgccatgccaggtgttgatataaatggggaatagcgtaccgagcgccaccagaaagatttttgcggattcatcaatgccaaaccacaaaatcaccagcgggatcagcgccagatgcggcacgttgcgcaacatctgaatactggtatccagcagccgttctccccagcgagatagcccgctaatcagtcccaaaatcaaccccaggcttccgccaatactaaagccaatcagcgcccgccaggagctgatcgccagatgctgccacagttcgccgctggcggagagcgtccagaacgccgtcaccactccttccggactaggcaaaatacgcgtgctcagccagccaacgctggaggccagttgccacaccgccacgatgcccaccggtaaaaaccagggggcaacgcgcaataaccacttcttcactggcgttgccattatttcttccttagctttgcgcgactttacgggggataaaatcattcgccaccgcttcgccttgcggattcagcggctgcggctggggaatttccgggatggcgacatccagaagcgggaacagcaactcgccaacccgatacgcttcttccagatgcggatagccgctaagcacaaaactgtcgatgccaagcgcggcatattcgttgattcgcgcagcgaccgtaggaccatcgcccaccagcgccgtcccggcaccgccgcgcactaagccaacgcccgcccataaattggggctgatctccagattgtcgcgcttgccgttatgtaacgccgccattcgctgttgccctacggaatccgtccgggcgaatgcggcctgtgctttggcgatagtttcatcatcaagatggctgattaaccgctcggcggcctgccacgcttcgtcgttagtttcacgaacaatcacatgcagacgaataccgaaacgaattttgcgtccatgcgcggcagctttcgcccgcacttgttcgattttctctttaaccagttccggcggttcgccccaggtgaggtagagatcaacctgttctgccgccagctcctgggcgacatcactgcttccgccaaagtaaagtggcggatacggctgttgaatcgccgggaagagcagttttgctccgcgcacatgaatatgtttaccgttgaaatcgacggtttctctctgcaataaacgccgccagacctgggtaaattccgcgctggcttcgtagcgctcgctatgatcaaggaacactccgtcgcctgccagctcttgtggatcgctgcctgtgaccaggttaaacaacgcacgtccattactgagacggtcaagcgtggcggcctggcgggcggcaacggtaggactggttacgctgggacgcagggcgacaagaaacttcagccgctgcgtcaccgggatcatgcttgcggcaaccagccacgcatcttcgcaggagcgccccgttggaattagcacaccggtatagccaagacgatccgccgcttgcgcaatttgttgcagataaccgtgatcaaccgggcgactaccttcttccgttcccagataatgcccgtcaccgtgggtcggtaaaaaccagaacatattcagactcataattgttttccttccagttgagtgggctgccagatgcgctggcgaatatcgacttttttcggcaccagacgattttcataaaacagatctgccgtttgctgctgtaaggcggcaacctcggcgttaaccggtttgatggtggtaggagggcgatgatctaagtaagaggcaatcaccggtgccggtaagcccatcgtttttgccagtaaagcgatgctttgctcgcgctggctgcgggttaacgcatcggcctcactaaaggttgccagtacgccctgaataaaagcgccgtttttttctgcatagggacgagctgccagataaaagcttccagtttgattgagatcggtgccgtctttcagcacccgcacgccgccctgtaataatgcagcagagtagtagggatcccagatagcccaggcgtcaacgttaccttgctggaacgcggcgcgggcatcagcgggcgtcaggtaagtgggttggatatcggtaaacttaagtccggcctgacgcagtgcacgcagtaaaaggttgtgactactggaacctttctgaaaggcaactttgtgacctttaagatcggctacggttttgatcgggctgttttctgccaccagaatcacttcggctttgggcttcggtggctcgacgcccacgtacaccaaatcagccccggcagcctgggcaaagattggcggaatatccccggtactgccgagatcaatactgccaacgtttaacgcttccaacatttgcggacccgcggggaactccacccaggagattttactttccggatagcgtttttccagtaactggtggctttttgccagcaccataccaatactgcctttctgatagcctatacgtaacgcttcagggctggattctgcagcaaccgcaaaagtagagacgctaagcaatcccgccagcgccagtttaatgatgttacgcatgggcattacctcgcagagacagaaggtcaggaacctgaacatcgcggcggtgcaatgcctgccagaaagtttctagcgcggtatcaagacgggtttgcagatttggcgtgaactggggtctgtgatggtaatcaattacttgactgtcatcggcaaacacgccgtgcaggatctcctgagctttcagtgcgcttaaaactggtttaagggcataatcgaccgccagcagatgggccacggtaccgcccgtcgccagcggtagcaccactttgccttgcaaagcgcgttctggcagcaggtcgagcagggttttcaacgcaccggaataggcggctttatacacaggcgtggcgacaatcagcccatcggcctgttgcagctgttcggtgaaggtcttgagtgccggactatcgaaacgagcataaagtagatcttccggggcgaagttttgcagattccagtgataaacctctacatccaggccatttagtttttcccgcgcatattccagcaaggagctggagcgagaaggaaagcgaggactacccgccagggtgatgacacgcatactctctccttataaccaattgttctttttttgttaacattgataacaattcggtcagtctgtcggagagacaagaaaattccaaatataaattttgtgtatctttttctgaaaataaactaaagaaagggctttatatatcacgcatatttatttattggatagtcattagatgttgaatcaatgaattactcgttcagttaatatttaaatattcatgaaatctataaattaaagatttgtcacttattggatttagtatgcttgatttaaatggcggacaattattgttattattaagtctaatgtcatttaaaggcattatcatatttacgaagagatcaggatgataacgatgaaaaaaagtgtattgacggcgtttataactgtggtatgtgcaacgtccagcgttatggctgctgatgataatgctatcacggatggcagtgtaacatttaatggtaaagttattgctccagcttgtaccctggtagctgcgacgaaagattccgtggtgactttgccagatgttagtgccacgaagttgcaaaccaatggtcaggtttctggcgtgcaaattgatgtgccaattgaattaaaagattgtgatactaccgtaacaaaaaatgcaacgttcacctttaatggcactgcggatactactcagattacagcgtttgctaaccaggccagttctgatgctgctacaaacgtggccctgcaaatgtatatgaatgatggtacaacggccatcacgccagacacagaaaccgggaacattttgttgcaggatggagatcagacgttgacttttaaagttgattatatcgctacggggaaagcgactagtggtaatgtgaatgcggtaacaaatttccatattaactattattaatagaactcattaattgttttattaattagtacccctccagtgttctggaggggatattcatattttttaagagtgactatttatgaaaacttgcataacaaagggaattgtgaccgtaagtttaacggcaatattactcagctgcagttccgcatgggcggcaggtaaaggcgggattggacttgcagcaacacgtcttgtttatagtgaaggtgaagagcaaattagtctgggtgtacgtaacaccagtccggatgttccttatcttattcagagttgggtgatgaccccagataataaaaaaagtgcagactttattattacaccaccgctatttgtgctgaatccggcaaatgagaatctgttacgcattatgtacattggagcgccgttggcgaaagacagagaaacccttttcttcactagcgtacgggcagtccctagtacaacgaagcggaaagagggaaataccctgaagattgccacacaaagcgtcatcaaacttttctggcgaccaaaaggtttagcgtatcccttaggcgaggctccggcgaaactgcgttgcactagcagtgctgacatggttacggtcagtaacccaacaccttatttcattaccctgacagacctgaaaataggtggaaaagtagttaaaaatcaaatgatttccccctttgataaataccaattttctctgccaaagggggccaaaaatagcagcgtaacgtatcgaaccatcaatgactacggggcggaaacgccgcaactcaactgtaaaagctaagccgtcttcagttaagagagcgagatgtatagaactcatcgacaacacagcctgttaagctctggtggagtgccaagctttattggtgggctggtggtgtttgtgagcgcagcgttcaatgcacaagctgaaacctggttcgatcctgcttttttcaaagatgatcccagtatggtggccgatttgtctcgtttcgaaaaaggacaaaaaataacgccaggggtttatcgtgtcgatattgttctgaatcagacaattgtagatacgcgcaacgtcaattttgttgagataacgccagagaaggggattgccgcctgtttgacgactgaaagcctggatgcaatgggtgttaatactgatgcgtttccggcttttaaacaactggacaaacaagcgtgtgtgccattggcggagattattccggatgccagcgtaacgtttaatgtgaataaactccgtctggaaattagtgtaccgcaaatcgccatcaaaagtaatgcccgtggttatgtcccccctgaacgttgggatgaagggatcaacgcgctattactgggatatagctttagcggggctaacagtattcatagcagcgcagacagtgattctggcgacagctattttctgaatttaaacagtggcgttaatttaggcccatggagattgcgcaacaatagtacatggagtcgtagtagtggccaaaccgcagaatggaagaatctcagcagctatttgcaacgggcggttattcctctgaaaggcgaactgaccgtaggtgatgattatactgcaggcgattttttcgatagtgtcagctttcgtggtgtgcagctggcgagtgatgacaacatgctgccagacagcctgaaagggtttgcgcctgtggtgcgtggtatcgccaaaagcaatgcccagataacgattaagcaaaatggttacaccatttaccaaacttatgtaagccctggtgcttttgaaattagtgatctctattccacgagcagcagcggtgatttgttagttgaaatcaaagaagcggacggcagcgtcaatagctacagcgtaccgttctccagtgtgccattactccagcgtcaggggcgaatcaaatacgcggtgacactggcgaaatacagaaccaatagtaatgaacagcaggagagcaaatttgcccaggccacgttgcagtggggcggaccgtggggaacgacctggtatggtggtggacaatatgctgaatattaccgtgccgccatgtttggtctgggatttaacctcggcgatttcggagcaattagcttcgatgcgacccaggcgaagagtacgctagcagatcaaagcgaacataaaggtcagagttatcgttttctgtatgccaaaacgctcaaccacttgggcactaactttcaattgatgggctatcgctatagcacgagcggtttctacaccctttccgacaccatgtataaacatatggatggctacgaatttaatgacggtgatgatgaagatacgccgatgtggagccgttattacaatttgttttacaccaaacgtggcaaactgcaggtcaatatctcccagcaattaggcgagtacggtagcttttatttaagtggtagccagcaaacttactggcatacggatcaacaggatcggctattacagtttggctacaacacgcaaattaaagatcttagcctggggatttcctggaactacagtaagtcccgtggtcaacctgatgctgatcaggtgtttgctctaaatttttccctgccgctcaatctgttgctccccagaagtaatgatagctataccaggaaaaaaaattacgcctggatgacctctaacaccagtatcgataacgaagggcacactacacaaaacctgggtttaacggagacattactcgatgacggtaacctgagctacagcgtgcaacagggatataacagcgaggggaaaacggctaatggtagcgccagcatggattacaaaggggcgtttgcggatgcccgagtgggctacaactacagcgataacggcagtcaacaacaactgaactacgctcttagtggcagtttagttgcccatagtcagggcattaccctggggcaaagcctgggggaaactaacgttctgattgcagcaccaggcgcagagaatactcgtgtggcgaacagcaccgggctgaaaactgactggcgcggatataccgttgttccttatgccacttcttatcgggaaaatcgaatcgcacttgatgcggcgagcttaaaacgtaacgtggatcttgaaaatgcagtagtcaacgtggttcccaccaaaggggcgttggttctggcggagttcaatgcccatgcgggtgcaagggtattaatgaaaacaagtaagcagggtataccgctgcgttttggcgcgatagcgacgctggacggcgtacaggctaatagcggcataattgatgatgatggcagcctctatatggcgggtttaccggcgaagggaacaataagcgtgcgctggggcgaagctcccgatcaaatttgtcatatcaattacgagcttaccgaacaacaaattaactctgcgattacgcgaatggatgccatatgcagataatctttggagaaaaatgcgtgagtttactacgactattttttgccgccgtcttaatgttatggtgcgctcaaaccgctgcttatagcgggcagtgtcatactactcaggggaatccgtatattggcgtcaattttggcgttaaaaccctggaggaagaagcaaatacggcaggggtagttaaagacaaattttatcagtggaacgaaagcaatgattattatgtttcctgtgattgcgataaagacaatgtcagaagtggccgatgggcattcgccgcggatagtccgttagtctatttaggcgacaactggtacaaaattaatgactatcttgccgccaaagttttattgcaggttaaaggcagttctcctactgcggttcctttcgaaaacgtgggcacagggggggatacccgatggcatatttgcgaccctggcggtcaacgtttaggtgggcagggggcaagcggtaatagcggtagcttttccctgaaaatattgcagccgttcgttggcagcgtcgtcattcctcctatggcgctggcgcgattatatgaatgctacaacatacccgcaggtgattcctgcacgactacaggtacaccggttttagtgtattacctgtctggtacgatcaatagtcttggcagttgttccgtcaatgccggagagacaattgaagttgatttaggtgatgtcttcgctgccaatttccgtgttgtagggcataaacctcttggggccagaacggcagaacttgcaattccagtcaggtgtaacacgggaaacgcgggattagttaatgtcaacctgagtctgacggcaaccacagaccccagctatccccaggcgattaagacgagtcgtcctggcgtgggcgtggtggtgaccgatagccagaacaacattatttcccctgctggtggaacattaccgctctctattcctgatgatgcagacagtatcgcgcgaatgaatgtctatccagtcagcacgacaggtgtaccaccagaaaccgggcgatttgaagccacggcaacggtgagaataaattttgattaacgcgtgaacgtatgaagaaaaaaacgatatttcagtgcgttatcttgttctttagcattcttaacatccatgtcgggatggctgggcctgaacaagttagtatgcatatttatgggaatgtggtcgatcagggctgtgatgtcgccaccaaaagtgcattacaaaatattcatattggtgattttaatatcagtgattttcaggccgcgaataccgtaagcactgctgctgatttgaatatcgatatcaccggttgtgccgctggtattactggcgcggacgtcctttttagcggcgaggctgacacccttgcgccgacactgctcaaactaactgacacaggcggaagcggtggtatggcaacggggattgccgtgcaaattcttgatgcgcaaagtcagcaagaaatcccgctcaatcaggtccagcctcttacgcccttaaaagccggggataacacactcaaatatcaacttcgttataagtccacaaaggcgggagcaacgggcggtaatgcgacggcggttctctattttgatctggtttaccagtgaaggagtgatgttgaaacggataatctggattctgttcttattgggattaacgtggggctgtgagctatttgcccatgatggcacggtcaacattagcggaagctttcgccgtaatacatgcgtgctggcacaggatagcaagcaaatcaatgtgcagttaggcgatgtcagcctgacacgtttttctcatgggaattatggcccggagaaatctttcatcattaatttgcaggattgcggaacagatgtcagcacggttgacgtcacctttagtggaacccccgacggagtgcagagcgaaatgttgtccattgaaagtggtacggatgcagccagcgggctggcaattgcgattctggatgatgcgaagatattgattccgcttaaccaggcgagtaaagactacagcctacatagcggtaaggtgccattaactttttatgcgcaattgcgacctgtcaatagcgatgtgcagagcggtaaagtgaatgccagcgcgacatttgtacttcattatgactaatacgtggaacagattggcgctcttgattttcgccgttttaagcctgctggtggcgggtgaattgcaggcaggagtggtggtcggcggaacgcgatttatctttccggcagacagagaaagcatatctattttactgactaataccagtcaggaatcctggcttattaacagtaaaatcaaccgcccaacgcgttgggccgggggggaagcgagcacagtgccagcaccattactggccgctccgccacttattctcctgaagcccggtacgacaggcacgttgcgcttgctgagaacggaaagcgacatcttgcctgtggatcgcgaaacgctatttgagttaagcattgccagcgtgccatccggcaaagttgaaaatcagagcgtaaaagtggcgatgcgcagcgtatttaaactgttctggcgacccgaaggtttgccgggcgacccgctggaagcttatcaacaattacgctggacacggaatagccagggtgtacaactcactaacccaacgccttattacattaacctgattcaggtgagtgtaaatggtaaagcgttaagtaatgtgggagttgtgccgcctaaaagccagcgtcagacaagctggtgtcaggcaatcgcaccgtgtcatgtcgcctggcgggcgataaatgattacggcgggttgagtgcaaagaaggagcaaaatctgccctgaaacaggttcggaaaacgtttgcgttttttttgccgcaggtcaattcccttttggtccgaactcgcacataatacgcccccggtttgcacaccgggaatccaggagagttcatgtactaccccttcgttcgtaaagcccttttccagctcgatccagagcgcgctcatgagtttacttttcagcaattacgccgtattacaggaacgccgtttgaagcactggtgcggcagaaagtgcctgcgaaacctgttaactgcatgggcctgacgtttaaaaatccgcttggtctggcagccggtcttgataaagacggggagtgcattgacgcgttaggcgcgatgggatttggaagcatcgagatcggtaccgtcacgccacgtccacagccaggtaatgacaagccgcgtctctttcgtctggtagatgccgaaggtttgatcaaccgtatgggctttaataatcttggcgttgataacctcgtagagaacgtaaaaaaggcccattatgacggcgtcctgggtattaacatcggcaaaaataaagatacgccagtggagcagggcaaagatgactatctgatttgtatggaaaaaatctatgcctatgcgggatatatcgccatcaatattagtagcccgaataccccaggattacgcacgctgcaatatggtgaagcgctggatgatctcttaaccgcgattaaaaataagcaaaatgatttgcaagcgatgcaccataaatatgtgccgatcgcagtgaagatcgcgccggatctttctgaagaagaattgatccaggttgccgatagtttagttcgccataatattgatggcgttattgcaaccaataccacactcgatcgttctcttgttcagggaatgaaaaattgcgatcaaaccggtggcttaagtggtcgtccgcttcagttaaaaagcaccgaaattattcgccgcttgagtctggaattaaacggtcgcttaccgatcatcggtgttggcggcatcgacagcgttatcgctgcgcgtgaaaagattgctgcgggtgccagtctggtgcaaatttattctggttttatttttaaaggtccgccgctgattaaagaaatcgttacccatatctaattatttcttcgaattcctctttataagataatcagggctttattttcagccctggttgttttatattcatcgctgttgcttatttagacattttgtacttttattgttgaggttattaagcgaagcgacaatggattgtgttgctgcggttttatagggtaggggagaggcagatgcgaattaaaccagacgataactggcgttggtattacgatgaagagcacgatcgaatgatgctcgatttagccaatggtatgctatttcgcagtcgttttgcgcgcaagatgttgactccagatgccttttctcccgcaggcttttgcgttgacgacgccgcgctctatttctcttttgaagaaaagtgccgcgattttaatttatctaaagaacaaaaagccgaactggtgctgaatgcactggtagcaattcgctatctcaaaccgcaaatgccgaaaagctggcattttgtttcccatggtgaaatgtgggtgcccatgccgggcgatgcggcctgcgtttggttgagcgatactcacgagcaggtcaatttgctggtcgttgaatctggcgaaaatgccgcactatgcctgctggcacaaccctgcgttgttattgcgggtcgcgcgatgcagttgggcgacgccattaaaatcatgaacgacaggctgaaaccgcaggttaatgttgacagcttcagcctcgaacaggcagtttaacgcgccaacttaagtgcagtcttcggtacacagctacagcaaagaatggtgccatcatcgcccattgcactttttttcagcggcgtgacttcgccttctaaaagctgaacacggcaacttccacaaatgcccgcgcggcaagaataagggatacgaattccctgattttctaattgctccagcaacacctgttggttatttccacgaaatgcctgtccctgccagtcaatatctacatttgcgtccggttgttgcgtgatgttggcggtatcatcagcggcagctgcgccgtaaatttttgccggagccgttgccagaatttccacctcatcgccaacgcgaatcacgccgctattacgggcaattaaattctgaccaaaatcgacatcgccgttatcctgggcagtgcggaaagattgcaatgtttttaatggttcgcctgccggatgtttttgccctttttctgggctgacggtggtgaaaatacagcggctacaaggtttaaccacatcaaacaccacatcaccaatgcgaatcactttccagcgatcttcttcccaggcactcgcgccggaaaccaccagattggggcggaattgctccatttttacactggccggacaacgttgttggagatcacgtaagctggcttcgttagcaagaaggtaaggatagccatcagcaaaactcagaggtacagtgttgtggcgtttcacgcgccgggtcatttgtggccccacccagcgtaattgcacttcgcgggagaaaaatccacttagccatttgttgatcgcgtctggcgcaattcgcgcggtaaaatgtgtgccccaaacttcggttggtgcgtcttgtgtggcgaaatcagcaaaacgaacatatgcgctactgccatctggtgcggtgagatgcaagccatcatgcacaggactaggagtaaaccgtaccatctggggaaactggcgagcggtaataaacgtaccgtcaggttccgtgatcataaagatgcgatcgaaggccagaccactgacatctgccagagcatgtgtaagaccaatgccgcgcatgcttttaacaggatgaataaaaagccggattaatgtcgccacggtgcggtcctcaaatgaaaataagccctcaactttatgacatgacgcgcttattagctataatgcgcaacaattttcttagcgcctgtcccattaggctattttatttgtcagtttggccctgggttatgctcgaaatcctcacgtacttgtgtacgctccggtttctccgcgctgtccatgtccagactgactgcaacaattacgcctactgcggtaggctcttagagtaaaagtgacgatatgaattctctgtttgccagtacggcccgtgggctggaagagctgttaaaaactgaactggaaaacctgggggccgttgaatgccaggtggttcagggtggggtccatttcaagggcgacacacggcttgtttaccagagcctgatgtggagccgcctggccagccgtattatgttgccgctgggcgagtgtaaggtttacagcgatttagacctctatctcggtgttcaggcgatcaactggacagagatgtttaatcctggcgcgaccttcgctgtccacttcagtggtttgaatgacaccatccgcaacagtcagtacggcgcgatgaaagtgaaagacgcgatcgtcgatgctttcacgcggaaaaatctgccgcgtccaaatgttgatcgcgatgcgccggatatccgcgttaacgtctggctgcataaagaaaccgccagtatcgctcttgatctgagtggtgatggtttacatctgcgtggctatcgcgatcgtgctggtattgcgccgatcaaagaaaccctggcagccgctattgtgatgcgatccggctggcagccaggaacaccgctgctcgatccgatgtgtggttccggtacgttgctgattgaagcagcgatgctggcgaccgatcgcgcaccaggcttgcaccgtgggcgttggggctttagcggctgggcgcagcatgatgaagctatctggcaggaagtgaaagcggaagcgcaaactcgcgcccgtaaaggcctggctgagtatagctctcatttttacggtagcgacagcgacgcacgggtgattcaacgtgcacgcactaacgcccgtcttgcggggattggtgaactgatcacctttgaggtgaaagatgtcgcgcaactgaccaatccgctgccgaaagggccgtacggcacagtgttgagcaacccgccatacggggaacgtctggacagcgaaccggcgctgattgcgctgcatagcctgctgggtcggatcatgaaaaaccagtttggtggctggaatctctctttgtttagtgccagcccggatctgctaagctgcttgcagctgcgtgcagacaaacagtacaaggcgaaaaacggcccgctggactgcgtacagaaaaattaccacgttgccgaaagcactccagacagcaaaccggcgatggtagcggaagactacaccaaccgcctgcgtaagaacctcaaaaaattcgagaagtgggctcgccaggaagggattgaatgttaccgcctgtatgacgccgatctgccagaatataacgttgccgttgaccgttatgccgactgggtggtggtgcaggagtatgcgccgccaaaaactattgatgctcacaaagcgcgtcagcgtctgttcgatattatcgctgcaaccattagcgtactggggattgcgccaaacaaactggtgctgaaaacccgtgaacgccagaagggcaaaaaccaataccagaaactgggcgagaagggcgagtttcttgaagttaccgaatataacgctcacttgtgggtgaacctgacggattatctcgatactggtctgttcctcgatcaccgcatcgcccgtcgtatgctcggtcagatgagcaaaggcaaagatttcctcaacctgttctcttataccggcagcgccaccgtgcatgcgggattaggcggtgcacgcagcaccaccaccgtggatatgagccgtacttatctggaatgggcagaacgcaacctgcgtctgaatggcctgaccgggcgtgcgcatcgcctgattcaggccgattgcctggcgtggctgcgtgaggcaaatgaacagttcgatctgatctttatcgatccgccaaccttctctaacagtaaacgaatggaagatgcgtttgatgttcagcgcgatcatctggcgctgatgaaagatttgaaacgtctgctgcgtgcaggtgggacgatcatgttcagcaacaacaaacgtggcttccgtatggatctcgacggcctggcaaaactgggactgaaagcacaagaaattacgcaaaaaacgctctcccaggatttcgcccgtaaccgccagatccacaactgctggctgattaccgcagcctgaaaggaatagtaatgagtttaatcagtatgcatggcgcatggctgagcttcagcgacgcgccgcttctcgataacgcagaactgcatatcgaagataacgaacgtgtttgtctggtgggccgcaacggcgcaggcaaaagcacgttaatgaaaatcctcaaccgtgaacaagggctggatgacggtcgcattatttacgagcaagatttgattgtagcgcgtctgcaacaggatccgccgcgtaacgttgagggtagcgtttatgatttcgttgccgaaggcattgaagaacaagcggaatatctgaaacgctatcacgatattagccgcctggtgatgaacgacccgagcgagaaaaatctcaacgaactggcgaaggttcaggaacagctggatcaccacaacctgtggcagctggaaaaccgcatcaacgaagtgctggcgcaactggggttagatcctaacgttgcgctgagcagcctttccggcggctggttgcgtaaagcggcattaggacgcgcgctggtgagtaatccgcgcgtgctgttgcttgatgaaccgacaaaccacctggatattgaaaccatcgactggctggaagggtttttgaaaactttcaacgggacgattattttcatctcccacgaccgtagctttatccgcaatatggcgacgcgcattgttgatctcgatcgcggcaagctggtgacctatccagggaattacgaccagtacctgctggaaaaagaagaagccctgcgcgtggaagaattacaaaatgccgagttcgatcgcaaactggcgcaggaagaggtgtggatccgccaggggatcaaagcacgccgtacccgtaatgaaggccgcgtacgcgccctgaaagcgatgcgtcgcgaacgtggtgaacgtcgcgaagtgatgggtaccgcaaagatgcaggtggaagaggccagccgctccggtaaaatcgttttcgaaatggaagacgtttgctaccaggttaacggtaagcaactggtgaaagatttttctgcccaggttctacgtggcgacaaaattgccctgattggtccgaatgggtgcggcaaaaccacgctgctaaaactgatgctcggtcagcttcaagtggacagcgggcgtattcacgttggcaccaaactggaagtggcttatttcgatcagcaccgcgcggaactggatcccgataaaacggtgatggataaccttgccgaaggtaagcaagaggtgatggttaacggcaagccacgccacgtattgggctatttgcaggactttctgttccatccgaaacgggcgatgacgccggtacgtgcgctttctggcggtgagcggaaccgcttgctgctggcgcgtttgttcctcaaaccaagcaacttattgattcttgacgaaccgaccaacgatcttgatgtcgaaacgctggaactgctggaagaactgatcgacagctatcagggcacggtattgctggttagccacgatcgtcagtttgtcgataacaccgttacagaatgttggatcttcgaaggcggcggtaaaattggtcgttatgtcggcggttatcatgatgcccgtggtcagcaagagcagtatgtggcgctcaaacagcctgcggtgaaaaaaaccgaagaagccgccgcggcaaaagcagaaactgtaaaacgcagcagtagcaaactaagctataaattgcagcgcgaactggagcagctaccgcaattgctcgaagatctggaggcgaagctggaagccctacagacgcaagtggcggatgcttccttcttcagtcagccgcatgagcagacgcaaaaagtgcttgctgatatggctgctgcagagcaggagctggagcaagcctttgaacgctgggagtatcttgaagcgttaaaaaatggtggctgatcgcaaaatagtcgatttaaacagagacagctgacaacggtaaaattgcctgatgaactgggtttatcaggcatgaaaaccaacactttgttagtcatctgtaaaatagcgcatcattaaggagtaccaatgtgcgaacatcatcatgccgcgaagcacatcctgtgcagccagtgtgacatgctggtggcgttaccgcgccttgagcatggtcagaaagcggcatgtccccggtgtggcacaacgttaaccgtggcgtgggatgcccctcggcagcgtcccaccgcctatgcgttggctgcactgttcatgctgttgctgtccaacttgtttccttttgtgaatatgaacgttgcaggagttaccagtgaaattacattactggaaattcccggcgtgcttttttctgaggactacgccagcctcggcacctttttcctgttgtttgtgcaactggttcccgcgttttgtctgataaccattctgttactggtgaatcgcgcggaattaccggtccgtttaaaagagcaactggcacgggtgctttttcaactcaaaacctggggaatggcggagattttcctcgcgggtgtgctggtcagtttcgttaaactgatggcttacggcagcattggggtaggcagcagctttctcccctggtgtttattttgtgtcctgcaactgcgcgcttttcagtgcgttgatcgtcgctggttatgggacgacatcgccccgatgccagaactgcgccagccgctaaaaccaggcgtcacggggatacgtcaggggctgcgtagctgctcctgttgtacggcaatccttcctgctgatgaacccgtgtgcccgcgttgtagtaccaaagggtacgttcggcgtagaaacagcctgcagtggacactcgcgctgcttgtaacgtccatcatgctgtatcttccggctaatattttgcccatcatggtgacggatttattaggcagcaagatgccgagcacgattctcgctggggtcattctgttatggagcgaaggctcttatcccgtcgctgcggtgatctttctggccagtattatggtgccaacgttaaagatgatcgccatcgcgtggctgtgttgggatgccaaagggcatggcaagcgcgacagtgaaagaatgcatttgatttatgaagttgttgagtttgtaggccgctggagcatgattgacgttttcgttatcgcggtgctcagcgcgctggtgcgtatgggaggtttaatgagtatttatccggcaatgggtgcattaatgtttgctttagtcgtcataatgacaatgttttctgctatgacgtttgacccgcgtttgagctgggatcgtcaacctgaaagtgagcatgaggagtcctgacagtatggaatctaataatggggaagccaaaatccagaaagtgaagaactggtctcccgtgtggatatttcctatcgtcacggcgctcattggggcctgggttcttttttatcattacagccatcagggaccggaagtgaccctgatcaccgcgaatgcggaaggaattgaaggtggcaaaaccaccattaaaagccgtagcgttgacgtcggcgtggttgaaagcgccacactggctgatgatttgacgcacgttgaaatcaaagcgcggctgaattccggtatggaaaaattgctgcataaagacaccgtcttttgggtggtgaaaccgcagattggtcgcgaagggattagcggcctgggaacgctgctgtctggagtttatatcgaactgcagccaggcgcgaaaggcagcaaaatggataaatacgatttgctggacagcccaccgttggccccgcctgatgcgaaaggtatccgtgtgattctcgatagcaaaaaagccgggcagctcagcccaggagatccggtgctgttccgtggctatcgggtaggtagcgttgaaaccagcaccttcgatacacaaaaacgcaatatcagctatcaactgttcatcaatgcaccttatgaccgactggtgaccaacaatgttcgcttctggaaagatagtggcattgcggttgatctgacgagtgcagggatgcgtgtggagatgggcagtttgacaacgctgctgagtggcggtgtcagctttgatgtgccggaaggtctggatttagggcagccagtggcaccgaaaacagctttcgttttgtatgatgatcagaagagcattcaggatagcttgtacaccgatcacattgattatctgatgttctttaaagatagcgtacgcggtctgcaaccgggagctccggtagagttccggggtattcgcctgggtaccgtaagcaaagtgccattctttgcgccgaatatgcgtcagacatttaacgatgattaccgtattccggtactgattcgtatcgagccagagcggctgaaaatgcagcttggcgaaaatgcggatgttgttgagcaccttggcgaattgttgaaacgtggtttacgcggaagcctgaaaaccggaaacctggtcactggtgcactgtatgttgatctcgatttctatccaaatacgcctgcaataaccggtattcgtgaatttaatggttatcagattatcccgaccgttagcggcggcctggcgcaaatccagcaacgactgatggaagcgttggataagatcaacaaactgccattgaatccgatgattgaacaggcaaccagtacgctttctgaaagtcagcgcacaatgaaaaacctgcaaacgacgctggatagcatgaacaagatcctcgctagccagagcatgcagcagttgccgacggatatgcagagtacgttgcgtgaattgaatcgcagcatgcagggcttccagcctggctccgcagcctacaacaagatggtggcggatatgcagcgccttgatcaggtgttgcgagaactgcaaccggtgctgaaaacgttcaatgagaagagtaacgcgctggtatttgaagcgaaggacaaaaaagatccagagccgaagagggcgaaacaatgaaaaagtggctagtgacgattgcagcactgtggctggccggatgcagctccggcgaaattaataaaaactattaccagttacctgtggtgcagagcggtacacaaagtaccgccagccagggcaatcgtctgttatgggtagagcaggtcactgttcctgactatctggcggggaatggtgtggtttatcaaaccagtgatgtgaagtatgtgattgccaacaacaacttgtgggccagcccgttggatcaacagttgcgcaacaccctggttgccaacctgagtacgcaactgcccggctgggtggttgcctcccagcctctgggaagcgcccaggacacgctcaatgttaccgtaacggagtttaacggtcgctatgatggcaaggtcattgtcagtggtgagtggctgttgaaccaccagggacaactgatcaaacgtccgttccgtctggaaggagtgcaaactcaggatggttacgatgagatggttaaagtgctggccggtgtctggagtcaggaagccgcttctattgcacaagagataaagcgtctaccttaattataaagatttgtaaatataaccgtctccggtatgttgcctgaggcggtttttttgtctctaacgtgcggaaaaatttgttcctcttcacattttttgtacaaccgacatgcccgtgtagctcacaaatatgacagtggcgtgaattttgcgcattgacggcagttatgattcgcggtattgcttaactgtgattgcacatttagtaatcactgttttcttttccaccagaaaccagtatgagggaaacgaggcatgaagagacaaaaacgagatcgcctggaacgggcacatcaacgtggttatcaggccggcatcgccggacgcagtaaagaaatgtgtccctatcagacgctgaatcaaaggagtcaatggctgggaggctggcgagaagccatggcggacagggtagtaatggcctgattctgtctctttaaaaagaaacctccgcattgcggaggtttcgccttttgatactctgtctgattataatcagaaggcagacgtatcctggaacagaccgactttcaggtcgctggcggtatagatcagacgaccatcaaccagcacttcgccatccgccaggcccataatcagacgacggttaacaatgcgtttaaagtgaatacggtaggtcacttttttcgctgtcggcagtacctgaccagtgaatttcacttcgccaacgcccagcgcgcggcctttaccttcgccgcccagccagccgaggtagaaccctaccagctgccacattgcgtccaggcccaggcatcccggcataaccggatcgccaataaagtggcatccgaagaaccacagatccggattgatatccagttctgcttcaacataccctttgtcgaagttaccacccgtttcggtcattttgaccacacggtccatcatcagcatgttcggtgctggcaattgcgggcctttagcgccaaacagttcaccgcgaccagaggcaagaaggtcttcttttgtataggattcgcgtttatctaccatgttctctgtaagccttattttattgaagcacgcaggatagctaacacgtgtacgctgaacaagtccgatcagttcggaataaaccagttcagccaacgtaatggccatggaaaacggtgacgtccttcctgttggcttgcttgcgcgatacgttcctggatggtttgcatcagcgtcgtttggccttcgccatcccacaccagatttaataataacggcagtgcgtcagtcacatcgtctactgcccagatggtgaatttgccttcttctaccgctttcaccagttcactgtgaagacttaaatggcgaacgttagctgtggggataatgacaccttgtttcccggttaactcacgttgctggcaaatagcaaagaagccttcgattttctcatttaaaccaccgaccggctgggcgcgaccgaactgatcgacactacctgtgatagcgatactctgattcaccggcacatcggcgagggcgcttatcagggcgcagagttcagccatgctggcactatctccatcaacttcactgtaactctgctcaaatgtcaggcttgcactgaaggggatctgttgctcaagctgtagttcgctcatcaggaacgcttgcatgatcatcatccctttcgcatggatattgccgccaagctccgctttgcgttcgatgtcggtgaattcaccatcgccaatatgcacaacgcagctaatgcgagaaggttcgccaaaagcgcgtggatgacccggaaattcaatgacgctaagggcgttaatttgcccgatgcgttcgccttcggtttcaatcaggatttgctcctgaaggatctcatcctgcatacgttcagcgaggaaaccttcgcgccattcacgctgctgcagcattaagtttagctgctcgccggagaaggtgtcgccatcacacagggaggcgacctctttacactggcggaggatccactgcgggctaagcggaagtgtttcttgttcaccggtgtagcgtgctgcttcgcggataagtatcggccaggcatccgctcccggtgcaggtaagtgattatgtctggcggtaaatgtcacccagcgacaccactgggttacactctccgcatcgacaatctgcagagtatcttcaaattcgctataaatagcctgctcactaagctctggctccatctcctggaaatcagccaaactttcgcgttcgcctaccagaatgactttcagcttcaatggcatgctaggcacagagacggggagagggcggctctcatcaaacgcaacccagtcaaaacgctcgcggttaacgatatttttcagccgcatccacagcagaggttgcgccagcagtgtacgcaaagagataatgagaataccgccatttgcctgatgcaccagaccaggctgcagggtaatgtcgccattaaactggcgcaggcagccaaagagttgctccgcttctacccagtcggcagcgacaacttgcgttaaagtcgcaaaattatcatctgcactcactgcgtgacgtaagcggatggagtggccggaaacctcatagtgaccgcccaccagttggcctgcatcgctttgtagcgtacgcgcggcattggcaataagattcagatactcagactcttccggggccttcgccagcataaaagaggaggatgctcgcgtatgcagcaactgctccagcgcaaattgcagccgcggttgagtatcactgaataaaggatcgttttcgtcaatcaaatgtggctgagcaaatatttcctgatagctatcggtatcaggaaccaggtcacgccatgcaagtttcgtaatggtcaaagttgatgttttttagtctgttgtcaaagccgcgattataccgtaaccggcactacagcacacgtagaaagcaccgacaatactcctggcatgggcgttaaagctcacaggatggagattcttttcttcactggcctaaaaagctgatattctgtaaagagttacacggtaacattgagatcgctatgaaatatcaacaacttgaaaatcttgaaagcggttggaaatggaagtatctggttaagaagcatcgcgaaggggagttaatcacccgttacatagaagccagtgccgcccaggaagccgtcgatgtgttgctcagcctggaaaatgaacccgtgctggtaaatggctggattgacaagcatatgaatccggaactggtcaatcgcatgaagcaaaccattcgggcaagacgaaagcgccattttaatgcggaacaccagcatacgcgcaaaaaaaagcatcgatctggaatttattgtctggcaacgtctggctggtcttgcgcagcgtcgcggtaaaacgctttctgaaacgattgttcagctgattgaagatgcggaaaacaaagagaaatacgcgaataaaatgtcttctctgaagcaggatctgcaggcattgctgggtaaggaataactgacgaaagtcagttcaatttactaaaggcaaaaaaaaccccgcagcagcggggtttttctaccagacgagaacttaagcctgcggctgagttacaacgtctttgatacctttaacttcgatctctacgcgacgatccggagccaggcagtcgatcagtgcagcacgctgtttcacgttgtcacaggtgttgccagtaaccgggttggattcgcccataccacgtgcggagatcttgtctgccgggatacctttggagatcaggtaatcaacaacagactgagcacggcgctcggacagaccctggttgtaagcgtcagaaccgatgcggtcggtgtaacccagaacaactacggaaccgtctttcggatccaggttgctcagctggctgtacagctgatccagagcagcctgaccttccggtttcagggttgctttgttgaagttgaacagaacgtcagacttcagagtgaagtgcttggtctgtacttccggtgccggagctggagccggagcaactactggagctgcttcgccctgaccgaaacggtaggaaacacccaggctcagcatgccgttgtccggacgagtgccgatggtgtgtgcgtcaccgatgttgttggtccactggtattccagacgggtagcgatttcaggagtgatcgcgtactcaacaccgccagcgaagaccggagaaacgccggtgtcgtggtttttaccataaacgttggatttagtgtctgcacgccataccatgccacccagacgagtgtagatgtccaggtcgtcagtgattgggtaacccagtttagcggtcagttgaacgccctgagctttgtatgcaccgttttcaacgctgcctttgtacggcatacgacctaaccagtcgtaacccatttcaaagccaacatacgggttaacctggtaaccaccaaaagcaccagcgcccagttggttttcatgggtcgggccattgttgttgatgaaaccagtgtcatggtactgggaccagcccagtttagcaccagtgtaccaggtgttatctttcggagcggcctgcgctacggtagcgaaaccagccagtgccactgcaatcgcgatagctgtctttttcattttttgcgcctcgttatcatccaaaatacgccatgaatatctccaacgagataacacggttaaatccttcaccgggggatctgctcaatattaactctaccgatatcttcggcttatgccgagcacccctggcgatgtaaagtctacaacgtagttgaaaacttacaagtgtgaactccgtcaggcatatgaaaaaaaagtcttgtataaggtatgtttaatcttttttgtcagcgacaatttacagaagagaatcgcggaaaccgcttcagacaagcctccgcaaggaaaattagtcacgactgaaagcattggctgggcgacaaaaaaagttccaggattaatcctaaatttacttaatgatacaaattagagtgaatttttagcccggaaagttgtctcgtggcgtgagaggatgcgcttaccggacgcataataaaccccatagcgttaccttcatttgccgcatcaacaagttcagcatgctcttcttcagtcaaatcatctgccaaccaaccgatcaccacactgtaattgcccgtgcgtaaagcgcgaaccatactctccacagtgtggcaaggggagagctggctaatctgcattactttcgttaagggtagcccagatgcctgaacccattcccgactcagtttttgttgcggtgttaaccagagttgccagcggctttgctgaccgagttgctgtaacaatggcaacagtagaagttgcgtcatcatgggctgatcttcgcgatagacaacttcactgataagcccggctgtagtgttttccgtagagacacgcgcaattttacttgctgcggaactgaagctgctagaacgatgtgcatagccactagtgtacataatcaatccagcccctgtgagttactgtatggatgtacagtacatccagtgacaacaaagatcaaccctattttcggaaagagcctcgcaaattttgtcgttggtgacgggaaaacataaattaatcttgccccttaagaataagttgcctattttcgtagttaacggatccgttaatgtgaatcattcttttatgttatgattttaaaaggaattttatgaaaagcctctcctataagcggatctataaaagtcaagaatacctggcaacgttgggcacaattgaataccgaagtttgtttggcagttacagcctgaccgttgacgacacggtgtttgcgatggtttctgatggtgagttgtatcttcgggcttgtgagcaaagtgcacagtactgtgtaaaacatccgcctgtctggctgacatataaaaagtgtggccgatccgttaccctcaattactatcgggttgatgaaagtctatggcgaaatcaactgaagctggtgcgtctgagcaaatattctctcgatgcagcgctgaaagagaaaagcacgcgcaatacccgggaaagactgaaagatttgcccaatatgtcttttcatctggaagcgattctcggggaggtggggattaaggatgtacgggcgttacgtatacttggggcaaaaatgtgttggttgcgactgcggcagcaaaacagtctggtgacagaaaagattctgtttatgcttgaaggtgccattatcggcattcatgaagctgcgctcccggtggcacgccgccaggagcttgcagaatgggctgactctcttacgccgaaacaggagtttcctgcggaacttgagtaattacgcgctaacaggagtttcctgcggaacttgagtaatctggcgttgcagacgaccaatctcaggcagtaatgcaatcaataatccaacttgttgtacgaccagaggttctttgctgtctgcccgtggttcaagttgctgcatccgctgtttcaggctagctaatgcctcattgacgcgttcttcatcagcaggttgatgatgtaacgcgtcatcaacatagcaaactgcgtcatcaagaaacgccagaatttcaggattagttaactgctcccggtgagcaccgagggcactgatatagctggtaaacgtatggttaaggcacagcaaccgaaacgcggcttcgcgaatttgcggggtaacgttcggctcgctggacatattacttaccacgctcgccagctcagcatcacggttgtgtgcatcgcggcgggcaatacgatacgccagacggttatcacgcccctgatggtattgctccagtatggcatcgagataccgacagttggcctctgtggcacgttcgagcatgcgcggcagattgcgaaactgccagtcaggccagatgtagctcactgccgcccacgcaatggcacaaccaatcagcgtatcgattacgcgaggtaacgctacttcaaaaccttcacccagtaagttaaaacacagtagcaccaaaagtgtgatgaacatcgttgcatgagcgtattgcacgttacggaaggcaaaaaagagcacgccggtaataaccagcagcaccagctgcccttccagacttggcacaaaccacagcacaggaatgccaatggcgatacctaccagcgtaccaataatccttaacttcaggcggtggcgcgtggcgttatagtttggctggcagacaaacaaacttgtcagcaagatccaatacccgtgatgcattccggttatctgaatgatggcgtagccgaagcacaacaccaggctcattcttaccgcatgacggaagagggcggattccggcgtgaagtgacggctaagacgcagccagatatcactcaacccgtgcgggctgtcatcagcgagctcattttcgtcattattatggggtagtgcctgggcctgttcactttcaattgttgccagttgggcatcaatggcgcgtaaattgttcagcaaaaatcccagtgttttgagtaaatcggcgggtgcgccgttatcgcgcatccgctccagcgcagcatcaatatgcgtaaaagcgcgctcaaaatgcggatcatgttgataaggctgacgcaacaaaatacagcgactcagttgctggcacgcctggccctgcatgctcatcagccgctgaaaacggaacagcacgtcgctgtggcgaaaatgttcacgcaatgtttgatactgaatatgagaagagctggcacgctcgtgaatatcctgtgcgacaaagtaataatgcagcgtgcgacgcgttccccgttgaccacgatcgccacgtaagcgggtcagcaggctgagtttcgtctgattcaatgtcgccatcagcagaccgttggcgagagccaaatcgtacagcggtgcctggctttgatcttcaatatcaggatcaaacatgcggctcttgagctcaagataacgcgccagttgttcatagcaacgcgccaggttgtcctgcagcgggcggaccgggaacagcagatgaccaataagtgtcaggacgttgtaccagacggcaccggccagcagatacatcggctgctgataccagtgctcatacagacttgttcccaacatagtgtaaatggcgatcagcaatgcaccgaaggcaattgttgcatagcgttgacccagaccgccgagcaaaatgaagccgctggtagagagcgttaagccaatcgcaaatagccagggccagggaaacagcaattctacactggcgctggcgataaaaaagcagaacagcgtaatgatgaggttacgcaaacgtcccgccagtcggtcatcgagatcggtcagcgccgctgccaccatccccagcgttagcggaatcgtcagttttacatcacccagccaccacggaaacgctgtggttccacaaagcgcaataaaaatacgcgcgtaatacagccaggcgctgttccaggtatagcgtttgagcaaaggacttagcataaaggccatattagtggattattcaaaacgacgacgtgcattggcttcacgcgcagcttgcgctgtttctacgcttaccacgcgacgaccaaccggccatagtgcaatagcggcaattttaaagttcgcaatgccgacaggaatgccaatgatactaatacattgtgcgatgcccgttgcaatgtgcatcaggcataaccaccagccaaagaaaatcagccagaaaatattcaataccgtaccgccagtattcagcagcacatttttgccagccgggttcagttcatcgacatgaatagcttcattgccataaggcaccagagacagtttagtgatctcccagcaggatcgtgtcagcggtaaggtaaaaatcagcacaatactgaccagagtcgccaacagccagcccagagtggtggcaaatccgccaagcacaaagttcagaatgttcaaaacggtacgcataaaacctcgctttactgtggttttcagtaatgggcggcaattgtaacgtttttttgggctggagcacgttttctctgacggttacactgataagaaataatttcgtgtggatctacagagtcatggaactgaaagcgacaacgcttggaaaacgtctggcacagcacccttacgatcgggcggtgatcctcaatgccgggattaaagtctccggcgatcgccacgaataccttattcctttcaatcaattactggcgattcactgtaagcgcggtctggtatggggcgagctggaatttgtactgccggacgaaaaagtggtgcgtctgcacggcaccgaatggggcgagacgcagcgtttttaccatcatcttgatgctcactggcggcggtggagtggcgagatgagcgaaattgcgtctggtgttttacgccagcaactggatttgattgccacgcgcactggggaaaataaatggctgacgcgtgagcaaacctctggcgtgcagcaacaaatccgccaggctttgagcgcgttgccgttgccggttaaccgactggaagaattcgataactgccgtgaggcgtggcgtaaatgtcaggcctggttgaaagatattgaaagcgctcggttgcagcataaccaggcgtataccgaagccatgcttaccgagtatgcggattttttccgccaggtcgagtctagtccgctgaatccggcgcaggcccgggcagtcgttaatggcgagcattctctgttagtgctggcaggtgcaggaagcggaaaaacgagcgtgctggtggcccgtgcaggctggttgctggcgcgtggtgaagcgtcccctgagcaaattttattgctggcgtttggtcgcaaagccgctgaagagatggacgagcggattcgcgaacggctacataccgaagacattaccgcacgcacgtttcatgcgctggcgctgcatattattcagcagggcagcaaaaaagttccgatagtcagcaaactggaaaatgataccgctgcccgtcatgaactctttattgctgagtggcgcaagcaatgcagcgaaaagaaagcgcaggcgaagggctggcggcaatggctgacggaagaaatgcagtggagtgtgccagaaggtaacttctgggatgatgaaaaattacagcgtcgccttgcctctcgcctcgatcgctgggtaagtctgatgcggatgcacggtggtgcacaggcagaaatgattgccagtgcacccgaagagattcgcgatctgttcagtaaacgtatcaagttgatggccccgttattaaaagcctggaaaggtgcgctgaaggcagaaaacgctgtcgattttagcggccttattcatcaggcgattgtgattctggagaaaggtcgctttatcagcccgtggaagcatattctggttgatgaatttcaggatatcagcccgcagcgggcagcgttgttagcggcattacgcaagcaaaacagtcagacgacgttgttcgctgttggtgatgactggcaggcgatttaccgattcagcggtgcgcaaatgagcctcaccaccgctttccatgaaaactttggtgaaggcgaacgctgtgatttagacacgacttaccgttttaacagtcgtatcggtgaggtggcaaaccggtttattcagcagaacccaggccagctgaaaaagccgctaaacagcttaaccaatggagacaaaaaagccgtcacgttattggatgagagtcaacttgacgctttgctggataagctctctggttatgccaaaccggaagagcgcattctgatcctggcgcgttaccatcacatgaggcctgccagcctggaaaaagcggcaacacgctggccgaagttgcaaatcgactttatgaccattcatgccagcaaagggcaacaggcggattacgtcatcatcgttggcttgcaggagggaagtgatggttttccggctgcggcgcgggagagcattatggaagaggcgctactgccaccggttgaggatttcccggacgctgaagaacggcggttaatgtacgtggcgctgacccgggcacgccatcgggtatgggcactgtttaacaaagagaatccctctccctttgtggaaatactgaaaaatctggatgtgccggtggcgagaaaaccgtaagaaacaggtggcgtttgccacctgtgcaatattacttcagacggtccgcgagataacgctgataatcggggatcagaatatcgaccgcgtcgttgaaatgcgggctctggattatgaagtctgccgttgccacgttggtggcgaccggaatgttccataccgtcgccagacgcagcaaggctttcacgtcaggatcgtgcggcacggcatttagtggatcccagaagaaaatcaatacatcaattttcccttcactgatcaatgcgccaacctgctggtcaccccccattgggccactcaacatcgcgttgacgttcatgccggtcgcgcgggaaattaagttaccggtagtgcctgttgcatacagtacgtgttgttccagtaacggttgatgccgttccacccagctcatcagcatttgtttgcagtgatcgtgtgccaccagcgcaatatgtttccgcgcaggtaaagtgcgagtcgtcagttccataatgtacatccgtagttaactttcctacagattactgtaagcacttatcgctgcaagataaagaccgaaaaagcctgcgcacaggcacaaaaatctcaggaagatggttgtttttccgcccactgcaggaaagtatttcgcgtttgtgggtcagccagtttaaaccaatacttcagccgttgttctgtgagcacctgagactgcggtggaatagcatccagctcggaaacaccgctaagcagcgtactgtcatctgccatcatcgtggcaaattgcggtagactagcgcgtttcgcggatttgttatagcgttcaacctcgacctcataatcaatcgtttttgccgtactggtaatggcgagaatatccagctttaccggaatcggcgtcgcatcgccatccaacaattcaaggcgcggcgcggcatcaaaatggttagcttcccgctcattctccaggcgaggcaggcgaaaattgacctggttgatgagctgggtattaaaactgaccaccagcggtggggagatatacagccgttcttcactattggaaagatgaatcgtcttctcaacgcgaaacactaactgatgcggtccattatccagttcaatgctgtccgcaccgcgcagcagagagctggaaaccttcttgccgtcgagtaccagaagatcgacatcggtactaagccgcagcgtggtggcaaaaacggataccggcaaacataatgcaatcaaggtggtcacgatgccggttttcataggtagctcctgtcaaaagaccgcccgaataataatgtgtcaaaatttttctttaatcatacttactaacatatagacatatttcccgcttttgctctcattcattcgtattagctgcatggttggcatgtcggctttgtcgtacactttgttaaacagtctggaggaaataatgaaagaaaccgatattgcaggcattttaacgtccactcacaccattgcgctggtgggggcaagcgacaaacccgatcgtcccagctatcgcgtgatgaaatatctactcgaccaggggtatcacgtcattccggttagcccaaaagttgccggcaaaacgctgctgggccagaaggggtatggcacgctggcagacgttccggaaaaagtcgatatggtcgatgttttccgtaatagtgaagcggcgtggggcgtggcacaggaagctattgccattggcgcgaaaactctctggatgcaactgggggtgattaatgagcaagcggcagtactggcacgggatgccgggttaaatgtggtgatggatcgctgcccggctattgagatccctcgcctgggcctggccaaataaaaaatccccggaaggcaaaaaccttccggggatttgttcagggattagttacgcagacgcggggcctggagttgtttgcggatggtctgcgccagctcatccatggatggctgttcaggatgttcatcctgcaattcgctacttagctgggcttcagccaggtaggtatgaaccggtaggccgttatcgtcctccatcactacgtgataccacggagcggcgcgaagctcgtcattcaccgccagctcatcagggctcggttcagagaggctataaaccgggtcgatatccacgaccactccgagataacctaacagggaatggcggacctgctggccgataccgaatttgctggcaatcatagtcacctcccgggaaatctttacctttgatataagggtaaaattccacatttcaagttacatgacgcgacaggcaaaccctttcagatatagcccttccggataggtagcgatcaccggatgatcggctgcctgacggaactgctctataaattgtacatcacgaccggcatcaattgcggcatccgcgatgattttctgaaataaatcgctggtcatcagaccggaacaggagaaagtcaggagaataccgccttcattcagcagctgaatcgccagcatgttgatgtctttataaccacgacacgcgcccatcaactggcttttattctcaacaaacttcggcgggtccatcacgataacgtcaaatttttcaccgcgatcgcgataagtacgcagcaatttaaagacatcatcacggacaaactcagccttgctcagatccagtttgttcagctcaacgttctgccgtgcaatatccagcgcttcctgggaggtatcaacgctgacaacctggctgcaaccgcccatcagtgcgcttacggcgaaaccaccggtataggagaaacagttcagcacacgtttattttcaacgtagcggcgggtagccaggcggctatcacgctggtccaggtagtagcccgttttgtgtccgtgctgaatatccaccagcagtttcattccgtgttcttcaatcggcagcagggcaggtggcaactcgccggtgacggggccctgggtcagctccattccttcttttttacgtaccgcgacgtcgctgcgatcgtaaatgctacattccgggtacagcgtttgcagggcactaattaatgccgcgcgctgatattctgccccagcactcagcagttgcagcaccagaaaattaccgaaacgatcgatagtaatacccggcaggccatcagattctccggcgattaaacgatagctgtcgaggccatctttttgcgccagccagtcacgccatttttgtgcttgttgcaaacggcgggaaaaaaaagcaatgtcgatagactcagacgggtcaaacgtccagacgcgcgcccggatttggctagctgggctataagcgccgcgtgctaaccattttccctgatgatcaacaatatcgatggtttcaccgaggctggctttaccttccatgcgggcaacggccccggaaaagacccacggatggcgacgaagtaatgatttttcgcgccctttggctaacactaaacgtacactcataatttacttttctgtcgatgcaaagaaatgggcgtcattgtccggagttttccatggatttgcaacgcgtccattaaggataaggagagcagcaatgagcaaagtctgcataattgcctgggtttacgggcgagttcagggcgtaggatttcgctacaccacacagtacgaagcgaaaagactgggtttaaccgggtacgccaaaaatcttgacgatggcagcgtggaagtggttgcttgcggtgaagaagggcaggtggaaaaattaatgcagtggttaaagagtggcggcccgcgttctgcgcgtgtagaacgggtgctcagcgagccgcatcatcccagcggggaattaaccgattttcgtatccgttaaatacattttaccggttttggcaggccagcaattttggtggcttgcttagccggacctttcggaaacagtcggtataaatagcggctgttacctttttcttcgccaaatttattcgccatcgcttttaccagcatacgaatcgccggagaagtattgaattccagatagaaatcacgcacaaaacgcaccacttcccagtgttccggactcaggctaatcccttcgttctctgcaatcaccacagccagcggctcactccactggctgctttctttgagatagccttcggtatccgtttctatctctttaccttcgaagatcagcataattattactaccttaatcagactggcggcagtgtaacaaaaaacaaagccccgcataaagcgaggctatgaaagtgttagcgggtgagattaatcgcggctagcgaagcccagaatgctcagcaggctgacgaagatgttgtacaggctaacatacaggctaaccgtggcacgaatatagttcgtctcaccgccatgaatgatgttgctggtttcaaacaagatagcgccagaggagatcagaatgaagaccgcgctgatcgccagatgcagagcaggcagctgcaggaagatattcgcaaccataccaatcagcaccaccacaatacccgccatcagcataccgccgaggaagctcatatctttgcgggtggtcagcacatatgcagagcagcagaagaacactaacgccgttccgcccagtgccatagcgattacgtcacccattccggcagacagataggtgttcagaataggtccgaggatataacccagaaaaccggtaaaggcgaatgcggagataatcccggtcggcttattcgccgttttataggtcaggaacatcaaaccatacatacccaccagcgtcagaatcagacccggagatggcagcatcagcaccgtactggcagttgcggtaatcgcgctaaaggccagcgtcaggctcagcagaaaataggtattacgcagcaccttatgggtgctaagcagacttgtacggtcatgactagaactaacaatacgatccattgagtcactctctatgacagatgtaattaattaagcagcataatgataatgcgtaagggcacccagaagttttacccatctttacgcatttgatctggaacaggtttaacagcggattatcaggtcattaagcaaatataacgccctgagaatttcgacaggcaaaagaaaaaggggttagcatttagctaaccccttatcttattggaatgacgcgcactataaacatcccgatgcggcgtgtaaacccctaatttgtttgtttgcctgaaaaacagccaaaagtgcattgatagcgtgaaataacagcagattgatcatttcatcaccatgaattccttctcttttactcgtttagcaaccggctaaacatccccaccgcccggccaaaagaaaaataggtccatttttatcgctaaaagataaatccacacagtttgtattgttttgtgcaaaagtttcactacgctttattaacaatactttctggcgacgtgcgccagtgcagaaggatgagctttcgttttcagcatctcacgtgaagcgatggtttgccttgctacagggacgtcgcttgccgaccataagcgcccggtgtcctgccggtgtcgcaaggaggagagacgtgcgatatgaataacgaggaaacattttaccaggccatgcggcgtcagggcgttacccggcgcagctttctcaaatattgtagtctggctgccacgagcctgggattaggcgcgggaatggcaccaaagattgcctgggcgctggagaacaaaccgcgcattccggtggtatggatccacggtctggaatgcacctgctgtaccgaatcttttatccgctccgctcacccactggcgaaggacgtcatcctttccctgatttccctcgattacgacgatactttgatggctgccgccggaacccaggcggaagaagtctttgaagacatcatcacgcaatacaatggcaaatatatcctcgcagtagaaggtaatccgccgctgggcgagcaggggatgttctgtatcagcagcggtcgaccgtttattgagaaactcaaacgtgccgctgccggagccagcgcgattatcgcctggggaacctgcgcgtcctggggctgcgtgcaggccgcgcgacccaatccgacgcaggcaacgcctatcgacaaagtcatcaccgacaaacccattatcaaagtacctggctgcccgccgatcccggatgtgatgagcgccatcattacttacatggtgacctttgatcgcttgccagatgtcgacagaatgggccgtccgctgatgttctatggtcagcgaatccacgataaatgctatcgccgcgcccacttcgacgccggagagttcgtccagagttgggatgatgacgctgcccgcaaaggttactgcctgtacaaaatgggctgcaaagggcctaccacctataacgcctgttcctccacacgctggaatgatggcgtttctttcccaatccagtctggtcacggctgcctgggctgtgcggaaaatggtttctgggatcgcggtagcttctacagccgcgtggtcgatattccgcaaatgggtactcattccaccgccgataccgtcggtttaaccgcgcttggcgtggtggcagcggctgttggtgtgcacgcagtcgccagcgccgttgaccagcgcagacgtcataaccagcaacctacagaaaccgaacatcagccaggcaatgaggataaacaggcatgagcactcagtacgaaactcagggatacaccatcaataatgccggacgccgcctggtggtcgacccgattacgcgcatcgaaggccacatgcgctgcgaagtgaatattaacgatcagaatgtgatcaccaatgccgtctcctgcggcaccatgtttcgcgggctggagatcatcctacaagggcgcgacccgcgcgatgcgtgggcgttcgttgaacgtatctgcggcgtctgtactggcgtacacgccctggctagcgtttacgccatcgaagatgctatcggtattaaagtgccggacaacgccaatatcatccgcaacattatgctggcaacgctctggtgccacgatcatctggtgcacttctatcagcttgccgggatggactggatcgatgtgttagatgcgctgaaagccgacccgcggaaaacttccgaactggcgcaaagtctctcctcttggccgaaaagttcccctggctatttcttcgacgtacaaaaccgcctgaaaaaatttgttgaaggcgggcagttggggatcttccgcaatggctactgggggcacccgcagtacaaactgccgccagaagctaacctgatgggctttgcccactatctcgaagctctcgatttccagcgtgaaattgtcaaaatccacgcggtctttggcggtaaaaacccgcatccaaactggattgtcggcgggatgccttgcgccatcaacattgacgaaagcggcgcggtcggggcagtcaatatggaacgcctgaacctggtgcagagtattatcacccgcacggcggacttcattaacaacgtgatgatccccgacgccttagccatcggtcagttcaacaaaccgtggagcgaaatcggcactggtctttctgataaatgcgttctcagctacggcgcattcccggatattgccaacgactttggcgagaaaagtctgctgatgcctggcggcgcggtgattaacggcgacttcaacaatgtgctgccagtggatttggttgatccgcagcaggtgcaggagtttgtcgaccacgcctggtatcgatatcccaacgatcaggtcgggcgtcatccgttcgatggcatcaccgacccgtggtacaaccccggcgatgtcaaaggcagcgataccaacattcagcagctgaatgaacaggaacgctacagctggatcaaagcgccacgctggcgcggtaacgcgatggaagtggggccgctggcgcgcacgttaatcgcttatcacaaaggcgatgctgcgaccgttgagagcgtcgatcgcatgatgagcgcgttgaacctgccgctttccggtatccagagtacgttaggccgcattttgtgccgcgcgcacgaagcgcagtgggccgcaggtaagttgcagtatttcttcgacaagctgatgaccaacctgaaaaacggcaatctcgccactgcttccacggaaaaatgggaacctgcaacctggccgacagagtgccgtggtgtcggttttaccgaagcgccgcgcggggcgttaggccactgggccgccattcgcgatggcaagattgatctctaccagtgcgtggtgccgaccacctggaacgccagcccgcgcgatcccaaagggcagattggcgcttatgaagcggcgctgatgaacaccaaaatggcgatccccgagcaaccgctggagatcctgcgtactctgcacagctttgacccgtgcctcgcctgtagtacacacgtgctgggcgacgacggtagcgagctgatctccgtgcaggtgcgttaacagcgaaggagaatcatcatgcaacagaaaagcgacaacgttgtcagccactatgtctttgaagcgccagtgcgcatctggcactggttgacggtgttatgcatggcggtgttgatggtcaccggatactttatcggcaagccgctaccttccgtcagcggcgaggcgacgtatctgttctatatgggctacatcaggttaattcacttcagcgccgggatggtttttaccgtggttttgctgatgcggatctactgggcttttgttggcaatcgatactcccgcgagctgtttatcgtgccggtatggcgtaaaagctggtggcagggcgtgtggtatgaaatccgctggtatctgtttctggcaaaacgtccgagtgccgatataggccataatcccatcgcccaggcggcgatgttcggctatttcctgatgagcgtctttatgatcatcactggttttgcgctgtacagcgaacacagccagtacgctatttttgcgccgttccgttatgtggtggaatttttctactggacgggtggcaacagtatggacattcacagctggcatcggctggggatgtggctgattggcgcgtttgtgatcggtcatgtctacatggcgctgcgtgaagacatcatgtccgacgacacggtgatctccaccatggtcaacggctaccgtagccacaaatttggcaaaataagtaacaaggagcgtagttgagctaaataagtaacaaggagcgttcatgagcgagcaacgcgtggtggtcatggggctgggcaacctgctgtgggccgatgaaggcttcggcgtgcgggtggcggaacggctgtatgcccattaccactggcccgagtatgtggagattgtcgatggcggtactcagggactgaacttgctggggtatgtcgaaagcgccagccatctgttgattctcgatgccattgactacgggctggaacctggaacgctgcgaacctatgccggagaacgcattccggcttatctcagcgcgaagaaaatgagcctgcatcagaacagtttctccgaagtgttggcgctggcggatatccgcggacatctgccagcacatattgccctcgtcggtctgcaacccgcaatgctcgacgactacggcggtagcctgagcgaactggcacgggagcaactgcccgctgcggaacaggcggcgctggcgcagcttgctgcgtggggaattgtgccgcaaccggctaatgaaagccgctgtctcaattatgactgtctgagcatggaaaattacgaaggcgttcgcttgcgccagtaccggatgacacaggaggagcagggatgagcaacgacacgccatttgatgcgttgtggcaacgaatgctggcgcgcggctggacgccagtcagtgaatcccgtcttgacgactggcttacgcaagcgccagacggcgtggtgttattaagcagtgacccgaaacgcacgccagaggtcagcgataatccggtaatgattggcgaattactgcgcgagtttcccgactatacatggcaggtggcgattgctgaccttgagcagagcgaagccatcggcgatcgctttggcgtctttcgctttcctgccactttagtgtttaccggcggaaactatcgcggcgtgctgaatggtattcacccgtgggcggaactgataaacctgatgcgcgggcttgtcgaaccgcagcaggagcgtgccagttgatctaaccgcagcaggagcgtgcctcatgagcgaaacttttttccatctgctggggccaggaacgcaaccgaacgatgacagtttcagcatgaatccactgccgatcacctgtcaggtgaatgatgaaccgagtatggcggccctggagcaatgtgctcacagcccgcaggtgattgcgctgttaaacgagttacaacatcaactaagcgaacgccaaccgccgttgggcgaggtgctggcagtcgatctgttaaatctcaacgccgacgatcgtcactttatcaatacgcttctcggggaaggggaagtgagtgtgcgcattcagcaggctgacgacagtgaaagtgaaatacaggaggcgatcttctgcggattatggcgggtgcgcagacgtcgcggcgaaaagttgctggaggacaaactggaggctggctgcgcgccgctggcgttgtggcaggcggcaacgcaaaatctcttgccgacagatagcctgttaccgccgcccattgatggcctgatgaatggcctaccgttggcgcatgagttactggcacatgtacgtaaccccgacgcgcagccgcacagcattaatctgacgcaattacccatcagcgaggctgatcggctttttctcagtcgtctctgtgggccgggaaatattcagattcgtaccattggctatggcgagagctatatcaacgccacggggttacgccatgtctggcatttacgctgtacggacaccttaaaaggcccgttactggaaagttatgaaatctgcccaataccggaagtggtgctggcagcgccagaagatttggtcgactctgcgcagcggcttagcgaggtatgtcagtggctggcggaagctgcaccgacgtaaaaagacggtaagtatcgctttcagtcttatgaatatcgcaatcggcgaatacctctggtcgtagagtttcaggataaagagggagatctaccattatcgggttatttttctctcttcgcctacaggagtgcgcatgtgggatgtcattgatttaagccgctggcagtttgctctgaccgcgctgtatcactttttatttgtaccccttaccctggggctgattttttttgctggctattatggaaaccatttacgtggtcaccggcaaaacaatctaccgcgatatgacgcgcttctggggtaagctcttcggtatcaattttgctcttggcgtggctaccggcctgaccatggagtttcagtttggtactaactggagtttctattccaactatgtgggcgatatttttggcgcaccgctggcgatggaagcattaatggccttcttcctcgaatccacctttgtcgggctgttcttcttcggctggcaacggctgaataaataccagcacctgctggtgacgtggctggtggcgttcggtagtaatctctctgcgttgtggatattgaatgccaacggttggatgcaatacccgaccggtgcgcattttgatatcgacaccctgcgtatggagatgaccagcttcagcgagctggtctttaatccggtcagccaggtgaaatttgtgcacaccgtaatggcgggctacgtgaccggggccatgtttattatggcgatcagcgcctggtatttactgcgcggacgggagcgcaatgtcgcattacgcagctttgccatcggttccgtcttcggtactctggcgattatcggtaccctgcaactcggagacagttctgcgtatgaagtcgcgcaagtacaaccggtaaaactggcggcgatggaaggggagtggcaaacggaacctgcacctgcaccgttccatgtggttgcctggccggaacaggatcaagagcgtaacgcctttgccctcaaaattcccgcgctgctagggatcctcgccactcacagtttagataaacccgtgccgggtctgaagaatttgatggctgaaacctacccacgcttgcaacgcggacgtatggcctggctgttaatgcaggaaataagccaaggcaatcgtgagccgcatgtgttgcaggcattccggggactggaaggtgacctgggctacggcatgttgctctcccgctatgcgccggatatgaatcatgtcacagccgcacagtaccaggcggcgatgcgtggcgcgatacctcaggttgcgccggtattctggagtttccgcatcatggtgggctgtggttccctgctgctactggtgatgctgattgcgcttgtccagacgctgcgtggcaaaatcgaccagcatcgctgggtgctgaaaatggcgctctggagtttgccgttgccgtggattgcgattgaagccgggtggtttatgaccgagtttggtcgtcagccgtgggcgatacaggacatcttaccgacatactccgcgcactccgctttaaccacaggacaactggctttcagtctgatcatgatcgtagggctttacaccctgttcttaatcgccgaagtctacctgatgcagaaatatgcccgtctggggccgagcgcgatgcagagtgaacaaccgacgcagcaacaggggtaaaggagaaaatcatgtttgattatgaaacattgcgcttcatctggtggctgctgattggcgtgatcctggtggtctttatgatctccgacggatttgacatggggatcggctgtctgctgccgctggtggcgcgtaatgatgatgaacgccggatagtgataaacagcgttggtgcacactgggaaggcaaccaggtctggttgatcctcgctggtggggcattatttgccgcctggcccagagtgtatgcagcggcgttttccggcttttatgtggcgatgatcctggtgctgtgcagtctgttcttccgcccgctggcctttgattatcgcggaaaaatcgccgatgcacgctggcgtaaaatgtgggacgccggtctggtcatcggcagtctggtgccgccggtagtcttcggtatcgccttcggcaacttgttgctcggcgtgccgtttgccttcacaccgcaattacgcgtggagtatctcggcagcttctggcaactgctgacgccattccctttattgtgcggattgctcagccttgggatggtgattttgcaaggtggcgtctggttacaactgaaaactgttggtgtgattcatctgcgtagtcagctggcgaccaaacgcgctgcactgttggtgatgctgtgctttttgctggcgggttactggctgtgggtcggtattgatggctttgtactgctcgcccaggatgctaacggtccttccaatccgttaatgaaactggtggcagtgctacctggtgcctggatgaataattttgtcgagagccccgttttgtggatcttcccgctgctgggattcttctgcccattgctgacggtgatggcgatttatcgtggtcgcccgggttggggatttttgatggcaagtttgatgcaatttggcgtgattttcacggcaggcatcacgctgttcccctttgtcatgccgagtagcgtgagtccgatctccagcctgacgttgtgggacagtacttccagtcagctgacgctgagcattatgttggtaatcgtgctgatatttttgcccattgtgttgctctacactctctggagctactacaaaatgtgggggcgcatgacaacagaaactctccgccgtaacgaaaacgagttgtactaaggagcagaaacaatgtggtatttactttggttcgtcggcattttgttgatgtgttcgctctccacccttgtgttggtatggctggacccgcgtctgaaaagttaacgaacgtaggcctgatgcggcgcattagcatcgcatcaggcaatcaataatgtcagatatgaaaagcggaaacatatcgatgaaagcgatcttaatcccatttttatctcttctgattccgttaaccccgcaatctgcattcgctcagagtgagccggagctgaagctggaaagtgtggtgattgtcagtcgtcatggtgtgcgtgctccaaccaaggccacgcaactgatgcaggatgtcaccccagacgcatggccaacctggccggtaaaactgggttggctgacaccgcgcggtggtgagctaatcgcctatctcggacattaccaacgccagcgtctggtagccgacggattgctggcgaaaaagggctgcccgcagtctggtcaggtcgcgattattgctgatgtcgacgagcgtacccgtaaaacaggcgaagccttcgccgccgggctggcacctgactgtgcaataaccgtacatacccaggcagatacgtccagtcccgatccgttatttaatcctctaaaaactggcgtttgccaactggataacgcgaacgtgactgacgcgatcctcagcagggcaggagggagtattgctgactttaccgggcatcggcaaacggcgtttcgcgaactggaacgggtgcttaattttccgcaaagtaacttgtgccttaaacgtgagaaacaggacgaaagctgtagtttaacgcaggcattaccaagcgaactcaaggtgagcgccgacaatgtcagtttaaccggtgcggtaagcctcgcaagtatgctgacggagatatttctcctgcaacaagcacagggaatgccggagccggggtggggaaggatcaccgatagtcaccagtggaacaccttgctaagtttgcataacgcgcaattttatttgctacaacgcacgccagaggttgcccgcagccgcgccaccccgttattagatttgatcaagacagcgttgacgccccatccaccgcaaaaacaggcgtatggtgtgacattacccactagtgtgctgtttatcgccggacacgatactaatctggcaaatctcggcggcgcactggagctcaactggacgcttcccggtcagccggataacacgccgccaggtggtgaactggtgtttgaacgctggcgtcggctaagcgataacagccagtggattcaggttagcctggtcttccagactttacagcagatgcgtgataaaacgccgctgagtttaaatacgccgcccggagaggtgaaactgaccctggcaggatgtgaagagcgaaatgcgcagggcatgtgtagcttggcaggttttacgcaaatcgtgaatgaagcacgcataccggcgtgcagtttgtaatgcataaaaaagagcattcagttacctgaatgctctgaggctgatgacaaacgaagaactgtctaatgcgtagaccggaaaaggcgttcacgccgcatccggccactttcagtttgcaatacgtacgcttgagatcaggattgtctactttgagtataacatccttgtgaaatctccctttcctcataccgcttgcactatatactgcgggtaggaaaggcgcgcagagggaaatataagattgttaactatccccctctggaaatacgacttgtgagcataagataaatcttagcaaaatacaaattaaagataaggaaattgttacgaaagctattaattattgttggtaatatagtttcaagtggtactataactggctgttaaatggcatttataactattaggtgcagagatattcgcttaaatggattagtttctttgtggaaaagtaactgatgttataatgtatgatgttgactatttcactattccaataaaaccagtcagctttaaacaagcagcgtcatattaagagagataaacatttgccgctgttggtcctcgcaggccatttacgcggcaaaattccacacgtaatcctggtataagcacttctgcgtcgcggggagtgaatgcggaaatatggacctgaacttctttacgaccgtcggaggggataatgaatcctttgccgcttttgcgatcaaaggttttgacaattcctgtcattttacgggacaaacaaattccttactgaaaatactgcgctgcactatacggggttaataaaataaagccagcgatatttaagaccgccggacggctaaaataaaatttgcttaatctcaattatcatgcgttaatagctgcgtcggtttgaaagacagacagcatacaaagtagtttactaaagcagttctcattatcaggcattatccccttcttttgagtctctctcctgaacactaagtagtttctgtattaaagccctgtttgccgaaaggcccaaaatgaaggaagtaaaatatgtctaataaaatgactggtttagtaaaatggtttaacgcagataaaggttttggctttatcactcctgatgatggcagcaaagacgttttcgtccatttcaccgccatccagagcaatgaattccgcacgctgaacgaaaatcagaaagttgaattttctattgagcaggggcaacgtggccccgcggcagcgaacgttgttacgctctaaggttgccattattactcaacatctccatttccgctgtccatgttgtcatggttcacagtaccgcacatcggcattcgatgtgacggagcgaaaccctttgggcgctaagtgtattttttgtaaatcgacgatgatcacctttgataacgtcgcgctgcaaatacgcactgaccatgcgccgctggattagtcaaaataatatcaggctccctcgtggagccttttttatatctgccttatttttcttcaacgctgtatgtatagtaagcgataacctgttgattattgaatctttcggggagatggcttataacatttcttacctgaccagggtaccgggaaccaacaccttactggcgtgttgctgtcttttaagaccagaagaggttaacagtgaatattgaagagttaaaaaaacaagccgaaacggaaatcgccgactttatcgcgcaaaaaatcgccgagctgaacaagaatacagggaaagaagtctctgaaattcgcttcaccgcacgagaaaaaatgaccgggcttgaaagttatgatgtcaaaatcaaaataatgtgattttgtgaacatcaccccgtgcgaggtgatgttccgcttgttgctaatttagtgaccaatcattggcgcttgtggaattaagcgtcggtacaattcctccggcaccgggctttgccatactcccgcatacattgcgtaaccaatcaccgcaaacataatccccagaaccagtagcgtcattaaccagccagacaacgcaaaggcttttttatttgccgcaggtttttgcagactaaaggtcaatgtactggctaccggacaactctctacgcaagtcatacagccggtacattccactgttcgtacctgaattaatttatcgaccgggatccgacttgggcaattttttgcgcatttgccacagtcgatacaactttcggcattgcgacgaatcttaaacgggctcaataggctaaccacgcccatcagcgcgccatatgggcaaagataacgacaccaggcatggcgaataaacaggctggcaatcagcaaaacggtcacgctgattaatgtcgcggtccccatatgacgaaagaaatcgagcattttaacgtccatcaccacgctgtaggggctcaacataaaatagtgaatcgcctgagcgggcatcaataacgcgatatagataaaaaaactcaacagcaaatacttcacgccgcgcagaggaatatccagccagcggggaaggacacattgccgaccaaacagtttgttaccgagatcgccgattaattcagaaagcgtaccaaccgggcataaccaactgcaaaaggcctttttgagtaatagactgatgacgataaaagcgaccaataacagcatcgcggcggcgtggacggacggtaactgacctgttacaaggctatatttcagattcatcagcccggcaatcggtagccagccttcgatacctcccggtctggcgacaaatgtcgtgctacttgccgtttcgtaatagcgcacccaataccagaacgtgatggcaatataaatattcattgccaacagtaataattgcgtcgctttacgccaggtcgtggcattacgccagtcattccacggtaatttgccgcccgtcgtgcctggccgccgctgccagcgggttcttttattctctgccatgattttgccagtccgttaagttgtataccaaatgccactattctagttgttcttaactggctgatattgattcaaatcgcgttcaggtctttcttatgcaaccatgcttccagagcggcaacactgcgtgtaatttcttcgtgtggaaggggggcagataatggctgctgctccagttgtgcgcatagctggctggcgatatgcattcccagactgctgcaactgctttttagctgatgcgcggcacgctttattttctcgctatcctgactggcgcgggcaatgtcgatttcatcgagaagcggcagggcatgttgtgtaaataataccagccattcgtggatcttctccgtccccattaactgagcatcttcattgagttggcttacatccaggctttgatcattattgacttgcagttggagatagtgcgccagtaactgaccgagcacttcacgcggcaccggtttagggataatcccgcggaataaactactggtacgctggcgcagcgtttcgtcaatgacatgggcgctaaagccaatcaaaaccaggctcggatattgctgtgccagttgtcgggcaagcgtaatgccgtcgatatccggcagatcaaaatccaccagtgcggcagcaaacggttcgctattttgcagtgtctctaaagcctgcgcggcattgccaacagcaacaatctgcgcaccactggttttcagcatctcaatggtaattcgctgggttagcgggttatcttcaattaacagcaaacgtaaaccgtcaagacgcaccgcctgattgactgtttttggcacgggtgccgtggcaacacgtaacggcaagcgtaaacaaaaacagcttccaacctccggcgtgctggtggcgctcagttcgccgcccatcgcctgggccagacggctactgatagtcagtcccagcccggtgccgccgcgtttgccgcttacctgcacaaatggctggaagatttctgccagtttcgcgggatcaataccgcagccgctgtcttccacttcgaccagccattgctcgccatcagtgcgactacgcaggataatgtacccttcgtcagtaaaacgcagggcgttgctcaacaggttggttataacctgacgaatacgtcgtggatcgcccattaacgcgcacggcatatcatcggcaattgccgttgccaggcgaatcgggcgacctttcacccgtccgctcattaattgcagggtactttccagcagcgggcgcggttcaaagggctcatcgctgacgctaacattcttgccacctgcttcgatagcggaataatcgagaatatcgttgaggatggtcagcaagctttcaccagagtcagtaattgcccgcaaatcatcacgctgggcgttaagtgcggggttatctgccagcagttgagcagtgccgagaataccgtacagcggtgtgcggatctcatggctcatcgccgccagaaacgcgctttttgcctggctggctttttctgcttccgcccgtgcctgtcggtgttctatcaccagttcctgcaattcagctgtacgcgctttgacctgcgccgccagctgttcgcggtggcgattcagtgcatgaacattgctgcgaaacgcatccatcagccgcccgatggtatccagctcccgtacgccagcggtttccgggaaaggggagtcaatatcaccgtccagcagccgttgcagcgcctgcgtttgttcggcaagtggacgcgtgacactgcgataaaccacgcgccagaggatcagaatcagtgcgcaaagactaaccatccccagcaataacaggctgtattgcccgcgtgcactcgctttttccagatgcgccagtccgtgctgattacgcagctcaatggtgtcgaccagctgactgacttcgctactaaactgcgcgaactgggcgatgttattttgtgcgagagtttgtaggtgattgctgatttcactgtcctgctgatacagcgccagcaaatcgctatattggctaacggtagttaacgttgttgcgacctgcgcacgaacacccggatcttcaatgcgtatttgccgacgttgcagaattttcaccgcattattgagctgcttttccagcgttggtgcatttttctggatctgctccagccccagattcatcaccatttgctgcacccgcagagcgctaaggcgcagttcattcatctggttaacatactcaagatcgatatcaatcagccgatcgagtgcactttcagcagcctgacgctgatcttgttcgatcaaatcgtaaatcccggcctgggtcgctccagcggaagttgtcgcattattcgcctgaccttgcgccaggcgtgcgatctcatcggcggcagcgactatctgctgactgagttgctgttgttgctggcgcagttgcaaacgctgccccaccagttccccttgctgacgtaagctacgggagatctcctgctcctgttgttcaatagcggtggtatcaaaaccttgttcccgtaacgcttgcagcaacgcattaatcttcaggctttgtgcggtgagcattcgcccctgcgcctgccacatcttttcgttatcggcactggtcaggttctgcgcggcgaaaagttcccaggcgctggcttcgctcaactggcgcgccatattcatggtaggaatcaatgcctgagtgttgtctttttccacctggctgataaagcgcaggttgtaccatcccaccagggtactggtcagggttaacagcgccatcagggcaaagcccatccagagtcttcgggtcagggttaaattcacggtcggtgcactttaggtgaaaaaggttgagtcgcaaagcggaatgcatctagcataaagccttattattgatgaggctatcatgcgcgtactgctatttttacttctttcccttttcatgttgccggcatttagcgctgataacctgttgcgctggcatgatgcgcagcatttcacggtgcaagcctctacgccgcttaaagccaaacgcgcatggaaactgtgcgcgctttatcccagcctgaaagatagttattggttaagcttgaactatggtatgcaggaggctgctcgccgctacggtgtggatttaaaagtgctggaggcaggcggctacagccagttggctacccagcaagcacaaatcgaccagtgtaaacagtggggcgcagaggccattttgctcggtagtagcacgaccagttttcccgacctgcaaaagcaggtagcaagtctgccggtgatcgaactggtaaatgctattgatgctccccaggtgaaaagccgcgttggtgtgccctggtttcagatgggctatcaaccggggcgatatctggtgcaatgggcgcacggtaaaccactgaatgtgctgttgatgcccggacccgataacgccgggggcagtaaggagatggtcgagggttttcgcgcagccattgccggaagcccggtgcgtattgttgatattgcgcttggtgataacgatattgaaatccagcgtaacctgttgcaggagatgctggaacgccatccagaaatcgacgtcgttgccggaacggccattgcggcagaggcggcaatgggggaagggcgtaacctgaaaacgccgcttaccgtggtgagcttttatcttagtcatcaggtgtatcgcgggctgaagcggggaagagtgattatggctgccagcgatcaaatggtctggcagggggaactggcggttgagcaggccatcaggcaattacaggggcaaagcgtttctgataatgtcagcccaccgattttagttctgacgccgaaaaatgccgaccgtgaacatattcgccgcagcctgagtccagggggatttcgtccggtctatttttatcagcacacaagtgcggctaagaaataatcagcacacatcagcggctaagaaataaccttcaccatgttgcgtcaccagtaaatccgcgctgagtttatgacgtaaacgacgaattaacacatcgacggtgcgcaggtcagggttttccacccgacgcgcagaaagcatacgtagcagacgttcacggctgagaatttcgcccggattcgtcacaaatgccaccaacatttcatactctgcgcgggtcagtttaatcggctcgccatcccgctccagcgtatggcggctcacattcaggcaataaccggcaaagcgatagcagttgtcctgagtgtgcggttgagcttgtcgcgcgaggtcgattcgccagagcagatttttcacccgtactaccagttcgcgcagttccagcggtttggtgacgtaatcgtctgcgcccatttccagcccaacaatacggtcaatccgatcgctgcgtccggtaaccagaataatccccaccgtactgcgttctcgcagggcgcgggttaacatcaggccattttcatcgggtaagttgatatccagcagaattaaatctacgctctgattctgcataatttcccgtagcccagcaccgctcgccgtaacggaaacggtatacccctcctgagtgaagtaggattgtaatcgcgcctgggtaaccggctcatcttcaacaataacaatgtgatgtggcatcagagggttttactcattctgttcatatctgttcatattctgccgtaagccgttcatcctgaccagtgccgctgttcatatttgctcattaagatcgcttcactaaaccataattctacaggggttattatgcggaaactctggaacgcgctacgccgacccagtgctcgttggagcgtactggcgctggtcgcaattgggattgtgattggcattgcgctgattgtattgccacacgttgggatcaaagtcaccagcacaaccgaattttgtgtcagttgccacagtatgcaaccggtgtatgaagaatataaacagagcgtgcatttccagaacgcctccggcgtgcgagctgaatgccatgactgtcatatcccgccggatattccaggcatggtgaagcgcaaactggaagcgagcaatgatatctaccagacctttattgctcactccattgatacacctgaaaaattcgaagccaaacgcgcggaacttgccgagcgtgaatgggcgcgaatgaaagaaaacaacagcgcaacctgccgctcctgccataactacgatgcgatggatcatgcgaagcagcatcctgaagcagcacgtcagatgaaggtggcagcgaaagataatcaatcctgcatcgactgtcataaaggtattgcccaccagttaccggatatgagtagcggcttccgtaagcagttcgatgagctgcgcgccagtgctaatgacagtggtgacacgctgtactctattgatattaagccaatttatgcggcgaaaggcgataaagaagcctctggttctctgctgcctgctagcgaagtgaaagtccttaaacgtgacggcgactggctgcaaattgaaattaccggctggacggaaagcgccggacgtcagcgtgtactcacccaattcccaggtaaacgcatctttgttgccagcattcgtggtgatgtgcagcagcaggtaaaaacgctggagaaaaccaccgttgccgacaccaataccgagtggagcaagttgcaggccactgcgtggatgaagaaaggcgacatggtgaacgatatcaaaccgatctgggcttatgcggatagcttgtacaacggcacctgtaaccagtgccacggcgcaccggaaatcgcccactttgacgctaacggttggatcggcacgctcaacggcatgattggctttaccagtctcgataaacgtgaagaacgcaccttgttgaaatatctgcaaatgaatgcgtctgacaccgcaggtaaggctcacggcgataagaaggaagaaaaataatgaacaataacgatctctttcaggcaagtcgtcggcgttttctggcacaactcggcggcttaaccgtcgccgggatgctggggccgagtttgttaacgccgcgacgtgcgactgcggcgcaagcggcgactgacgctgtcatcagcaaagagggcattcttaccgggagccactggggggctatccgcgcgacggtgaaggatggtcgctttgtggcggcaaaaccgttcgaactggataaatatccgagcaaaatgattgccggattgccggatcacgtacacaacgcggcgcgtattcgttatccgatggtacgcgtggactggctgcgtaagcgccatctcagcgatacctcccagcgcggtgataaccgttttgtgcgcgtgagctgggatgaagccctcgacatgttctatgaagaactggaacgcgtgcagaaaactcacgggccgagtgccttgctgaccgccagtggttggcaaagcacggggatgttccataacgctagcgggatgctggcgaaagctattgccttgcatggtaatagcgttggtacgggcggagattactctaccggtgctgcgcaggtgatcctgccgcgcgtagtcggtagcatggaagtgtatgaacagcaaacctcctggccgctggtattgcagaacagcaaaaccattgtgctgtggggctccgatttgctgaaaaaccagcaagcgaactggtggtgcccggatcacgatgtttatgaatattacgcgcagctaaaagcgaaagtcgccgccggtgaaattgaggtcatcagcatcgatccggttgtcacatccacccatgagtatctggggcgcgagcatgtgaagcacattgcggttaacccgcaaactgacgtgccgctgcaactggcgctggcacatacgctgtacagtgaaaacctgtacgacaaaaacttccttgctaactactgtgtgggttttgagcagttcctgccgtatctgctgggtgagaaagacggtcagccgaaagatgccgcatgggctgaaaaactgaccggcattgatgccgaaaccattcgtgggctggcgcggcagatggcggcgaacagaacgcaaattattgctggctggtgcgtgcagcgtatgcagcacggtgaacagtgggcgtggatgattgtggttctggcggcgatgctggggcaaattggcctgccaggtggtggttttggttttggctggcactacaacggcgcaggcacgccggggcgtaaaggcgttattctgagtggtttctccggctctacgagcattccgcctgttcacgacaacagtgactacaaaggctacagcagcactattccgattgcccgttttatcgatgcgatcctcgaaccggggaaagtgatcaactggaacggtaaaagcgtaaaactgccgccgctgaaaatgtgtatttttgccggaactaacccattccatcgccatcagcagatcaaccgcattattgaaggcttgcgcaagctggaaacggttatcgccatagataaccagtggaccagtacctgccgctttgccgatatcgtactgcctgcgaccacgcagtttgagcgtaacgatctcgaccagtacggcaatcactccaaccgtggcattatcgccatgaaacaggtggtgccgccgcagttcgaggcgcgcaacgacttcgatattttccgcgagctgtgccgtcgctttaatcgcgaagaagcctttaccgaagggctggacgaaatgggctggctgaaacgcatctggcaggaaggtgtacagcaaggcaaaggacgcggcgttcatctgccagcgtttgatgacttctggaataacaaagagtacgtcgagtttgaccatccgcagatgtttgttcgccaccaggcattccgcgaagatccggatctcgaaccgctgggcacgccgagtggcctgattgagatctacagcaaaactatcgccgatatgaactacgacgattgtcaggggcatccgatgtggtttgagaaaatcgaacgctcccacggtgggcctggcagccaaaagtatccgttgcatctgcaatctgtgcatccggatttccgacttcacagccagttatgtgagagcgaaacgctgcgtcagcaatatacggtagcgggtaaagagccagtattcattaacccgcaggatgccagcgcgcgcggtattcgtaacggtgatgtggtacgcgtctttaacgctcgcggtcaggtgttggcaggggcagtggtttctgaccgctatgcacccggcgtggcacgaattcacgaaggggcatggtacgatccagataaaggcggcgagcctggtgcgctgtgcaaatacggtaaccccaacgtgttgaccatcgacatcggtacaagccagctggcgcaggcgaccagtgcgcacactacgctggtggaaattgagaagtacaacggaacagtggagcaggtgacggcgtttaacggccccgtggagatggtggcgcagtgcgaatatgttcccgcgagccaggtgaaaagttgaattaacccgcgtcgcaggtgaaatcatgaccacgctgacagcacaacagattgcctgtgtttacgcctggctagcgcagttgttctcccgtgagctggacgatgaacaactgacgcaaatcgccagtgcgcagatggctgaatggtttagcttgctgaaaagcgaaccgccgctcactgcggcggtgaacgagctggaaaaccgtattgccacgctgacagtacgtgacgatgcccgtctggaactggccgcggacttttgcggcctgtttctgatgaccgacaaacaagcggcgctgccgtatgcaagcgcctacaaacaggacgagcaagagattaaacgcttgttagttgaggcagggatggaaaccagcggcaatttcaacgaaccggcagatcatctggcgatctatctcgaattgctcagccatctgcattttagcctgggagaggggaccgttcctgcgcgaagaatcgacagtttgcggcaaaaaacactgacggcgctgtggcaatggttaccagagtttgttgcgcgttgtcgtcagtatgacagctttggtttttacgcggcactaagccagttattgctggtgttagtggagtgcgaccaccaaaacagataacgtcgtttgtgcgcctgaaaagacgcgtttagcgtcgcatcaggcattatggcgcagttgccggatgcggcgtgaacgtcttatccggcccacaggaactgtaatctttgtagaccggttaagatgcgtcatcgcatccggcaaacacacatcacggatgagctacaaaccgggaaagccgctggcgcagcaggcggttttcctgcttcaggtgcgcaatatcatccattaacgtcagcgccaccgcgatccccggccagtccagagccagttcatgacgcaggcgtaccgcgcgttgcaccacaatggcggcatggtcgtcaaatacccaggttgtttcctggatctcacgcggttcaaccacccccaaaccgacaatttcattcaactcctcttcagagatgccggtatgcaggcaaaattcggtaatagtaaaagtcaccgtaacattagccattatgctttcccccaatctttacgtggatcaaaagagctctgggcgtctgccagttgctgccacagcgcggcagtgttttcatccggtttcggcggcatcacgattttcagtaccgcatacagatcgccggtctgttttttgctcaccagacctttgcctttaacgcgcaatcgttgcccggcctggctgcctggcgggatagtcagcaaaatgctttctttcagtgttggaacggtgactttagcacccagcgccgcttcccacgggctaaccggcaccacaatttccagatcctggccgacaatatcaaacagcggatgtggcgcaatatgaatcaccagccacaaatcgccatttggaccgccgttttcgcccggcgtcccctggcctttcagacggatgcgttgaccattgccgacgcccgccgggatcttcacattcagcgttttcggaatttcctgttcgatcatgccaaaggcgttataaaccggcaggttatagctgatggtacgcttatgctcagtaagcgtttcttcgaggaataccgccacttcgatttcaatatcgtggccgcgtgtggcggggcgttgacggctctggcgggcatgctgaccgaaaatactgctgaagatatcgtcaaaatcttcggcgttaaaactctgaccgtcgccatggtggaactgacggttaaattgcggatcgttgcgatgttgccacatctgatcatactcagcgcgacgttgttcatcacttaacacttcccaggcttcagcgacctctttgaagcgggcttcggcatccggttctttgctgacatcaggatggtatttgcgggcaagtcgacgataggcggtcttgattgtcttgagatcgtccgtcggtttcacgcccatgatggcgtaataatcctttaattccatagcgttatctcgcgtaaatcaacacaaattgaaggaacccctgtaaggtaactcctataagtgtagggtaatcctcaaaatttcatatgccaacacagaatatgttattgaaatcatcgcggagaggaggtcgccatcaagatgggttgctgaacatattttaaacaggtgaaaaagggtgagcgatttttgatagttgaaccaggcactttaagtttaactagggcgtcattatttattaaattttatagacgctatatatgggtagtaatatacatggaattagttgcactgcaaataattatttgaaacaggcctggaacgatataaaaaatgagtacgaaaaaaatcaaacatatagtatcacgctttttgaaaacacactggtgtgttttatgcggttatacaatgaactcagacgtaaagtaaatgaagaggatactccatgtctggaatgtgaaagtctagaaaaagaatttgaggaaatgcagaatgataatgatctaagtttatttatgagaatattgcgtactaatgatacacaaatttatagtggggttagtggaggtattacatatactatacaatatgttcgagatattgatattgttagagtgtccttgccgggcagagctagtgagtctatcacagattttaaaggttattattggtataactttatggagtatattgaaaacattaatgcgtgtgatgatgttttttctgagtattgttttgatgatgaaaatataagtgtccagccagagcggataaatacgccgggaatatctgatttggattctgacattgatttgtctggtatatcttttattcagcgtgaaactaaccaggcattaggattaaaatatgctcctgtagatggcgatggatattgtctgttaagagctatactggttttaaaacaacatgattatagttgggcgctggtcagttataagatgcaaaaggaagtttacaacgaattcattaaaatggttgataaaaaaacgatcgaggctcttgttgatacggcattctataatctcagggaagatgtaaagacgttatttggcgttgatctacaatctgacaaccaaattcaggggcagagtagtcttatgagttggagctttctgttttttaaaaaacaattcattgatagttgcttgaataacgaaaaatgtatcctgcatttacccgagtttatatttaatgataacaagaacttgcttgctttagataccgacacgagcgataggattaaagcggtgaagaattttcttgttgttcttagtgatagcatttgcagtttatttattgttaatagtaatgtggcaagtatctccttggggaatgaatcctttagtacagatgaagatcttgagtatggttatttaatgaacactggcaatcattatgacgtttacctccctcctgaactttttgctcaggcttacaagttaaacaataaggaaatgaatgcgcaactcgactatttaaatcgttatgcaatttaatggcaaaggcatatgctaaaaaccattgttattagtctcacacttttttattggtaaatattgtctctgtattggtaacgccgcagatattctgtttagccacaggtgcaattatcagcggcgtacgcgaggcaggggctaatcaggcatagtttgcgtcaaaccttgcctgtttttgaagatgtatatagaaaaacaggcgttcaacaagccattttgcgaacctgttcccggaaaaaagtcatatttctgtcacactctttagtgattgataacaaaagaggtgccaggaatgaacaaaacgctaatcgccgcagctgtggcagggatagttttactcgctagtaacgctcaggcacaaaccgtaccggaaggctatcagctacagcaagtgctcatgatgagccgccataacttacgtgcgccgctggcgaacaatggcagtgtgctggagcagagtacgccgaataaatggccagaatgggacgtccccggtgggcaactcaccaccaaaggtggcgtgctcgaagtgtatatgggccattacatgcgtgaatggctggcagagcaggggatggtgaaaagcggggaatgcccgccgccgtacaccgtttatgcctatgccaatagtctgcaacgtaccgttgcgaccgcacagttctttattaccggcgcattcccggggtgtgatattcctgtgcatcaccaggaaaaaatgggcactatggacccaacctttaacccggtgatcaccgatgattccgccgcattcagtgaacaggcggtggcggcaatggagaaagagctcagcaaactccagcttaccgacagctaccagctactggaaaaaatcgttaactataaagattcccctgcctgtaaagagaaacaacagtgtagcctggtggatggcaaaaatacctttagcgccaagtatcaacaagaaccaggtgtttccgggccgctgaaagtcggcaacagcctggtagatgcgtttactttgcaatattacgaaggttttccgatggatcaggtggcctggggagaaatcaaatctgaccagcagtggaaggtgttgagcaagcttaaaaacggctaccaggacagcctgtttaccagtccggaagtggcgcgcaatgttgcgaaaccgctggtcagttatatcgacaaagctctggtcaccgatcgcaccagcgcaccgaaaattacagtgttggttgggcacgactccaacattgcctctctgttaacggcgctggatttcaaaccgtatcagttgcatgaccagaacgaacgcacgccgattggcggcaaaatcgttttccagcgttggcatgacagcaaagccaatcgcgatttgatgaaaattgaatatgtgtatcagagtgcggaacagttacgtaatgccgatgcgttaaccctgcaggcacctgcgcagcgtgtgacgctggaattaagcggttgcccgatagacgctgatggtttctgcccgatggataagtttgatagcgtgttgaatgaagcggtgaaataacagaaaactcccccgcgagaagcgggggagtcgctggttaaacgtttttacgttcgatggtctgttcgccccaaaaaaggctatctttatcggtcttagcaaaggctttgactaacacttcatcactaccttcttcccaaatcttttccgccattttttcgtcgtacccggcgacttcgaaaatggcctcggctatttccgggctcgtattgcgcagagatgcccattcaccgacgtgatgagctttcgcttcttgagttggcatgcgtatcctcctgttgaagattagccgttaagtttaactgccagacctgcgacatattccccttgataacgagcaatagacagttcttcctggctgggctggcgactaccgtcaccgcctgcgatggtggttgcgccgtacggcgtaccgccgcgaacctgactaacgtcaaataattcctgcgctgcgtagccaatagggacaattaccatgccgtgatgcgcaagggtcgtccaggtggatgtgatggtttgttcctgaccgccgccagtaccggtggaactaaagacgctcgccagttttccgtatagtgcgccggaagcccacaggccgcccgtctggtcgaggaaggtacgcatttgaccggacatgttgccaaagcgggtaggtgtaccaaaaataatggcgtcgtaatcggccagttcttgcggggttgcaaccggtgcagtttgcgttttaccgcctgctttttcaaataattgcggcggcatggtttccggtacacgcttaacgacaacttcagcgccatccactttgcttgcaccctcagcgactgcgcgtgccatcgtttcaatatgtccgtacatggaataataaagcaccagaactttagccatttctaaccactcctcgtgttatctctattccgtagcgattcgctaccacttatttaaagataagacgtccttttcagagtgcaaatttcacaaccacttatttgatttataacaactttcacaagcacgtaattttgtcgcaaaatgacacatttttatctcatcgcgtttttttaatcataagagcggcttatggataattattggagatgatatctattctcgctaagaagctgttgcaggatattaccaaacgcgggtctgcccgcgtcagttcactaagcttagtcccacgtagcgaaaatatggcagccgccatacgccgcgttaattctatgcaatatgatgtctatacccagacggaggtcagtaatggcaaaccatcgaggcggttccggcaattttgcagaagaccgcgaaagagcaagtgaagcaggtaaaaaaggtggacagcacagcgggggtaatttcaagaatgacccgcagcgcgcatctgaagcaggtaaaaaaggtggtaagagcagtcacggcaaaagcgacaactaaccgggctaatcaatgacgaatgcatttttgtctgtagctcgtcaaaaagccatcaccgccggttacccggtggttgatactgatgacaaatgtaagcttgcctgatgcgcgatgcttatcaggcctaccagaagattgcaatatattgaatttgcactgttttgtaggccggataaggcgtttacgccgcatccggcatgaacaatgcgtacgttgtcaacaatctgcaccgccggtaaccccggcggttttctgtttatggctcctgatgaacaacttctggcggtggaacgtcaaccaactttctgcttaacaacgcattgagtaaaatcgcgccaaaggttgctgtaccaatccctcccaacgtaaaaccgcccagcgtgagagcaaaatcacccgcgcccagcactaaggttactgcgaccataatcaaattaccgttctggcttaaatcgacacggttttgtacccatatccttgcgcctgcgacggcaatcagcccgaacacaacaatacttgcaccaccaataaccgcggccggaatggtatgaatcagcgcaccaaatttcggactaaagcccaacagcatggcgatgacggcagcagcaacaaacaccagcgtgctgtagactttggtcacggccatcacaccgatattttcagcataggtggtcacgccgctaccgccgacagagccggaaagcatcgttgccagaccatcgcctacgaatgcccgccccatatacgggtccatattgcgtccggtcatcccggcgactgccttgagatgacctaagttttccgccaccagaatcaccgccacgggcgcaatcagcatcattgcctgaccattaaaagcaggagtggaaaaatgtggcagaccgaaccaggcagcatggctgacgagagtaaaatcgacggcttttcccagccctaaaacgttggtcatcacgccatacagcagacaggcgacaattaatcctacgagaatcaataaccgctggatcatgccacgggtaaacaccgccaccagcccaatacacagcaccgtcattaccgccatccagctatcaaaggcgctagcgcttacacttttcactgcgataggcgctaagttcaggccaatcgccatcaccaccgcacccgtcaccaccggcggcatcagtcgttcaatccagcgcgtaccgattttcatcaccaccaggccaatgacggtataaaccagcccacaggcgataatcccgcccagcgcaatgctgatattcgggttaatgccctgaccgttaaagcccgtcgcggcgatcaccacgccgacaaaagccgcgctggagccgagataactggggacgcgcccgccggtaataaagaaaaacagtaacgtgccgatcccgctcattaaaatggaaagattgggatccagccccatcagaatcggcattaacaccgtcgcgccaaacatcgccaccgcgtgttgaacgcccattactgccgtctgagcaaacggcaatcgttcatccggcgcgaccacgccgctctctgtagaggtgctttttaactgccagtgaggaaaaccgaacattgccatcagctgtctccttaaggaggttaacaagcagggcgcatcagcgcgtgataactgcgatcgaaccacaccagcccgtagggtgtggtgtgacgatgaatcgcttcgatggcgcaaaacagaatgtcgtgggtgccgacgctcaccacctggctgatacggcagtcaaagctaaccagagcctcttccagttgcgggcatccggtcacccccgtctgccagcgggcggcggcaaagcggtgttccatgggcgttttgccgccaaaaaggttactaagcggctcctgcccggcgctaagtgtatttacacacagcgttcgattttcattgaatgccggccagacggacgccccacgattcaggcacaccagtaatgtgggcggcgtatcggtcacactgcagacggcgctggcggtgaacccggcgcgcccggctggaccgtccgtggtgataatattgaccgccgcgcccatgcaggacatcgcatcgcgaaaagtttgttgatcgacaatgttcatagtttgctccttacaacagcccgcaggcttcttcaaaggacagacgtggcaggcgcgcataaagcttgctgctatcgccatagccgatattaatcagcagattgctcttcagcgtgctgcccgtaaaaaaggcgtcgtccacgtgttgacggtcaaagccgctcatcgggccggtatccagtcccagcgcccggcaggcgacgatcagataggccgcctgcatggaactgttgcgaaacgctgtttcttcggcaagttgtgggctggaggtaaaccaactgcgggcatcaccgtggggaaacagtagtggtaaccgttcataaaattcactgtcccaggcgacgatagcggtgacgggcgcggtcagggttttttgcagattgccgctggaaagtgccgggcgcagacgttcttttccttctgccgtgcgggtaaacacgatccgtgccggagaacagttagcacttgtcggcccccatttcatcagggcataaatctcccgtaacgtctcatcgctgacgggtgtctcccgccagccgttgtgagtgcgggcatcggtgaacagggtgctaagcgcacctgggctaacggcttcgttcatagcaattccttacagggcggcttcacggtgatgtaacaggctggcaagcccgttgagtaacagagcattaaacgtttcgggatcggtcacgttgcaggcgtgtccgccatagggcatcaccattttctggctatcgggcagggcggcatgaagttcactggaacatgctgttggcaccagcagatcatcactggcgcagatgatttgcaccgggcagcggatgcgatccgcatggtgactaaagtcagcgcgtttgagggcgttaagtcgacgcagtaaattatttttgccctgaaaatgcgccagtgccagcgcgtcttctgcctccaggcgaggtgcgcgggccgccatccagtcggcgggatagaggaacaacggctgcgcttccacccatgcctgcgcgccgccgctatacagtaatcgttcgcgaacctgaaaacagcggcgcgtatgggcgtttattcgtagccagccgttaacgctgatcagcacagttacgctcgcgggataatccagcgccagctgcattcccaccagcgcaccgagcgcatggccgaccactgcgtaatgctcaatccctgcggctaccagcgcctgatgcagttccgctgccatctgggcgatactgtaatcttctgccagcgtgtcgggattattgccggtgccgcgctggtcgtaacagactacctgatactcctgctccagcaccgccagttgcggtaaccagtaactgccgctacccccaagaccgctaatcaacaccactacgggcgcatcagcataagggggaggactgagactaagtttcatcgcggcctcacttggcgatatgcgcaattgtggcgatttccaccagcgcgtcaggttttaccagtccgcactgaatgcagaatcgcgccggtttatcacccggaaaaaactcggcgtagatttcgttaatcgcggcgtaatttttccagtcggtaataaagatgctgttgaaggtcacatccgccatcgtgccacccgccgtctcgatcaccttgcggatagtttccagaacgtggcgggtttgcgcctttgggtcatcggcaaacagcacgttattatgttgatcaaaagccagcgtaccggagacatacaccacgccatcagccagcgtgccgggaacgaagggggccagcggtgcgctgctgccagcgggaataattacggattttggcatcgttaaactccttaagcgatatgagcaaaggacgtgggagaaagcgcgtcgcagaatgtttcgacgtcgctgacccagccaaaaaaggtttcgatattgaacaacgcggctttctgcgcaaatttcggccccgcctggtgagttgcgtcttcaagcaccacgccgaaatactccagaaaaaagccgtcgcgtagcgtgctttcgacgcagacgttggtagcgatgccggtgaaaaccagatggcgtattccgcggctgcgcaaaatgctgtccagcggcgtattgaagaaaccgctgtagcgcggcttcggcagcacaatatcgccaggctgcggcaccagttcatccaccagttgataatcccaggagcctttcgccagcaatttcccctgcagctgcggctgcttacgcatggttttcagggcgttgcttttatgaaaattcggactgccgggtccgccagcctcgacatactgttcatcccagccattttgaaaccagatgatcagcatccctgccgctcgcgctgcggtcacggcggtttgaatgttggcaatgaccgggcgagtggtactgacatcaaacccggcgagatctaagtagccgcctggcgtggcataagcgttttgcatatccaccacgatcagcgcactttgctgcggatcgaaggtaatggcttccggtcgagcggttaaggtcgtcatcatgccacctcctgagtcagcgcaggtagatgggcgcggcattgcatcagtggttgaatgcgctcgccgaaggtttcgattccgctcagaaaatcgtcgaaggttaacagcacgccttcggcaccaggcacgcttgcgacttcatctaacatgcgcgcgacactggcgtaagaaccgactaacgtccccatattgatgtttaccgcgctagtgggatcggccatctgacgaacgttggtgtcagtaccggagcgggtatctttctgactttgttcggttagccagcttaacgcctcttcatccgcgcccgctttgtagtgttcccatttggcgcgagcggcatcgtcggtttcatcggcaatcaccataaacaacacataagagccaacgtcgcgtccggtttgctctgcggcctgtttcatccgcgcagcggtcggggcgaaagccgtgggtgtatttacgcctttgccgaaacagaagttgaaatcggcataccgggcggagaacgccatgccagcgtcgctttgcccggcgcagatcactttcatggggacactcggttgcggactcacgcgacaatcattcatggtgaaaaaatcgcctttaaaatcgcttttccccgtgccccacaggtcgcgcagcacctgaacatattcggtgagatagtcgtaacgacgggagaaatagtcatcgccaggccagatacccatctgctcatactcgggcttttgccagccagtcacgaggttgacgccaaaacgcccgccagagatggagtcgatggttgcggccatacgggcgacgattgccggaggtaacgttaaggtggcagcagtggcgtaaatctgaatgcggctggtcacggccgccagccccgccatcaaggtgaagctctcaaggttgtgatcccagaactcagttttgccgccaaagccacgcagtttgatcatgctcagggcgaaatcgaaatggtagtgctccgctttttgcacaatggctttattcagttcaaaggtcggcatgtactgcggcgcgtgggtgctaatgagccagccgttgttgccaataggtacgaatacgccaattttcatcatcaacctctcttcgtctcgtaaagtgaaagtcagacggggcgctgcatcctgcatatccttttcagccgcgtattggcttgtttgcaaagcggatgccagtttttaaaaagttaatgttattaatctgttaacattacgttatctaaaatatctggtaaaaagtggactaaacggtcaaaacagttgcacataaaacatgcatctgtgcgcgatgagagtgcagaaggtcgaggccgggcgggggttttgctatcctgttgccaatctacaagaggggagagcgcatgacgcaaggcgcagtgaaaacaacgggtaaacgtagccgcgcagtaagcgcgaagaaaaaagcgattcttagcgcagcactggacacttttagtcaattcggttttcacggcacaaggctggagcagatcgcagagttggcgggtgttagtaaaaccaatctgctgtattactttccgagtaaagaggcgctgtatattgccgtgctgcggcagattctcgatatctggctggcaccgttaaaagcgtttcgtgaagatttcgccccgctggcggcgatcaaagagtacatccgtctgaagctggaagtcagtcgcgattatccgcaggctagtcgcctgttctgtatggagatgctggcaggcgcgccgctgttaatggatgaactgacgggcgatttgaaggcattaattgatgagaaaagcgcgctgattgccggttgggtcaaaagcggcaaactcgcgccgattgatccgcagcatttgatttttatgatttgggcttccactcaacattacgccgatttcgcccctcaggtggaggcggtgacaggcgcgacgttgcgcgatgaggtatttttcaatcaaacggttgaaaacgtgcagcggattattattgaggggattcgaccacgttaaagatgccggaggaggttgtaacatcctccggctacctgtttaacctatagtcattaagctggcgttaccgccagcggcagcggtattcacactcaggctacgctcgatatacagccgttccagaaggatattgctttcgccacgggcaaaaccctgcacgctaacaattgtgccatcccgcgcggcaactgcttcacacaatgcgcgaagctgatcgctatcaccgtggaagatcaccgcatcaaacggttgagcggttatattttccgctttcgccagttgaatacgttcgctgactgcgcttggcaatgccttcactaactgacgatgcagcgcgtcatccggccacagtacctggctgcccaccgccagcacggcggcgagctgagtcagcgcatcctgctcatcatcggcaatacacaacacgcgctcacgcggcagcagcgtccaggtgttgcgttcacccgtcggccccggcagcaatcgttgtgttcctgcctgcgccagctcgccatattgcgtacataacgcctgcaattctggacgatttgctgcccattcccgcagtgcatttagcggctgagtcaatgcggctttcaactgcgcatcgaccggatactttgcatcctgacgcgcgagcgtcactgccagcgcactttccgggcgattcgccagcagacggtagagatagagcggaccgcctgctttcggcccggtaccggacaacccttcgccgccgaacggctgcacaccaaccactgcgcccaccatattacggttaacatacaggttaccaacatgggcgctgccagtgacctgggcgatggtttcatcaatgcgcgtatggacgccaagcgtcagaccataaccggaagcgttaatctgctcgatcagctctggtagctggttacggttgtaacgcaccacatgcagcaccggaccaaagacctctttttgcaattcggcaaagtcatccagttcgatcagcgtcggggcgacaaaggtgccgctttgccattcacgggcatcttcgctgttttcccgcaccgcctggaacaccggacggcctttgctacgcatggtctgaatatggcgctcaatattggctttcgcttcgctatcaatcactggaccgatatcggtggtcaggcgacccggattacccatccggcattcggccattgcgccgcgcagcattttcaacgtgtggtcggcaatctcatcttgcaggcacagcacgcgcagcgcgctacaacgctgacccgcactgtcgaacgcgctggccagtacatccacgacgacctgttcggtcagtgcactagaatcgacaatcatcgcgttcatgccgccggtttcagcgatgagcggaatagggcgaccctgagcgtccaggcggctggcgatattgcgctgcagtaacgtagcgacttcggtactaccggtaaacatcaccccgcgcacgcgatcatcacccgtcagttgcgcgcccacggtttcaccccgacctggcagcaattgcaccacgcctggcggtacacccgcttccagcaaaatggcgatcccttgcgcggcaatcagcggcgtttgttctgccggttttgccagcacgctgttacctgccgccagtgcggcggcgatctgcccggtgaaaatagccagcgggaagttccacggactgatacacaccacaggccctaatggacggtgggtttcgttagcgaaatcatcccgcacctgtccggcgtagtagtggagaaaatcgaccgcttcgcgcacttcggcaatggcgttactgaaggtttttccggcctcacgcaccagaataccaatcagttgctgcatctggctttccatcagcacggcagcgcggtgcaaaatcgctgcgcgttcagccggaggcgtggcaaaccagattggcgcgttattaaccgcactttccagcgcctgttctacttcacgcggcgtggcttcacgcacatagcccacaatatctttcggttccgcagggttaataacggggctcatctcacctgccgctaccggttgttccagcattggcaaggcctgccatttttgcagtgcactattgagcagggcagaggagaggctggccaggcggtgttcgttagcgagatccagccctgcgctgttgtcgcgcccgtgaccgtaaagatcgcgcggcaggggaattttcggatgcggtaatccagtttgcccttcctgttgcgccagtttttctacagcagtgaccggatcggcgaccagttcatccagtggcaaagaggtgtcggcaatacggttaacaaagctggtgttagcaccgttttccagcaggcgacgcaccagatacgccaacagcgtttcatgtgtgccaaccggagcataaatacgacacggacggttaagtttgccgtcggcaactttcccggggacctgctcatacagtggctcgcccataccatgcaggcactggaactcgtactgacccgggtagtagttctgccccgccagttgataaatcgccgccagcgtatgggcgttgtgcgtcgcgaactgcgggtagattagattcggcaccgccagcagctttttcgcacaggcgagataagaaacgtcggtatacaccttgcgggtataaaccggataaccttcaaggccgtccatctgcgcacgcttaatttcactatcccagtacgcgcctttcaccaggcgaatcatcagacggcgacggctgcgggtggcgagatcaatcaggtaatcgatcaccaacgggcagcgtttttgataagcctgaataacaaaaccgatgccgttccagcctgccagttccggctcgaaacagagtttttccagcagatcgagggagatctccaggcgatcggactcttcggcgtcaatgttgataccaatatcgtactgacgcgccagcagggtgagacttttcagacgcgggtaaagctcttccattacccggtcatactgggcgcggctataacgcggatgcagcgcgctcagtttgatactaatgcccggcccttcatagatgccacgaccgttagacgctttaccgatggcgtgaatcgcctgctgataggaaaccatatacgcctgtgcatctgcggcggtcagcgcggcttcgcccagcatatcgtaagagtaacggaaacctttctcttccagcttgcgggcattggctaacgcttccgcgatggtttcgccagtgacgaactgctcacccatcaggcgcatcgccatatccacacctttgcggatcagcggttcaccgcttttaccgataatgcggttcaggctgcgggagaggctggcttcgttatgggtggaaaccagtttgccagtaaacagcagcccccaggtggcggcattaacaaacagactcgggctacgaccaatgtgactctgccagttaccgttgctgattttgtcgcgaattaacgcgtcgcgggtggctttgtcgggaatacgcaacaacgcttccgccagacacatcagcgccacgccttcctggctactcaggctaaactcctgcaataacccctggaccatacctgcgcgaccactggcatttttttgattacgcagtttatcggccagctgatacgccagtttgtgcgcctgttcagcaactggctgcggcaggcgggcttgttccagcagcatagaaaccgcttcggtttccgggcggcgataggccgcggtgatcgcggcgcgggaaacgctctggggcaatatttgctcggcaaagtcgaggaatggctggtgtggttcctctgccggagtcggtgcttcatcgctctcattggccgcgccagaaagcagcgcaggtagctccggcagagtatcgctgttttccagttgttcgagataagaaaaaatcgcctgcttaattaaccagtgtggtgtgcgatcgatacgtgtcgcggcagacttaatacgctcacgcgtcgcgtcgtccagcttaacccccatggtggtggttcccatgccattactcctgttgttcagaaaggtgcaacttaacgttatcgtgaaatatccatgatgttgcaactttgtgcaaccatgttaaatgtgacatgcgtagcaagcttaaaaatgaatgaaatgttaataaaagaaatcgatatgacagggattaaaaaaataactcagactttttctctgcggcagttaacatttttgaaaggtgcaaccgcaaaaaatgtgagagagtgcaacctgatgaaaaatagtgtcgctgagcactaaaatttaatgtaaatggtgtgttaaatcgattgtgaataaccagcgcttccggcaggatacggtcgccctggtaaaacataaactctgttaccccgttccggtggcagatataacggcaagtttcgacattgccgataataattttttggagactttagatggctattagcacaccgatgttggtgacattttgtgtctatatctttggcatgatattgattgggtttatcgcctggcgaagtacgaaaaactttgacgactatattctgggcggtcgtagtcttgggccattcgtgacggcattaagcgcgggtgcgagcgatatgagcggctggctgttaatggggttgccgggcgctgtttttctttccgggatttccgaaagctggatcgccattggcctgacattaggcgcgtggattaactggaagctggtggccgggcggttgcgtgtgcataccgaatacaacaataacgccttaacactgccggattatttcaccgggcgctttgaagataaaagccgcattttgcgcattatctctgcgctggttattttgctgttcttcaccatttattgcgctagcggcattgtggcaggcgcgcgtctgtttgaaagtacctttggcatgagctacgaaacggctctgtgggcgggcgctgcggcgacgatcctttacacctttattggcggtttcctcgcggtgagctggactgacactgtacaggccagcctgatgatttttgccctgatcctgacgccggttatcgtcattatcagtgtcggtggctttggtgacagcctggaagtgatcaaacaaaagagcatcgaaaacgttgatatgctcaaaggtctgaactttgttgccattatcagtctgatgggttgggggctgggttacttcgggcagccgcacattctggcgcgttttatggcggcggattctcaccacagcattgtccatgcgcgtcgtattagtatgacctggatgatcctctgcctggcaggggcggtggctgtcggcttctttgggattgcttactttaacgatcatccggcgttggctggtgcggtaaatcagaacgccgagcgtgtgtttatcgaactggcgcaaattctgtttaacccgtggattgccgggattctgctgagcgcaattctggcggcggtaatgagtaccttaagttgccagctgctggtgtgctccagtgcgattaccgaagatttgtacaaagcgtttctgcgtaaacatgccagccagaaagagctggtgtgggtagggcgtgtgatggtgctggtggtggcgctggtggcgattgcgctggcggcaaacccggaaaaccgcgtgctgggcttagtgagctacgcgtgggcaggctttggcgcggcgtttggtccagtggtgctgttcagcgtgatgtggagtcgcatgacgcgtaacggtgcgctggcggggatgatcatcggtgcgctgacggttatcgtctggaaacagttcggctggctgggactgtacgaaattattccgggctttatcttcggcagtattgggattgtagtgtttagtttgctgggtaaagcgccgagtgcggcgatgcaaaaacgctttgccgaggccgatgcgcactatcatagcgctccgccgagtcggttgcaggaaagctaagggacttagcctgcggcggttttgtttggcttcagcagcgggttgcgctcccttaatgtgcctcgccatataaattgaatggtgcagggagcgcgcagggggcggccaatcgccgccgccccctgctgtcccggccttcggggaacgcttcagcgattttgacgccaccaacacccgagctgttattatgttccgggcaaaaagttagatttgataatcgcggatggacgaaattgcttgatacacccgcttatcagttttacatggaagctctgatgcattgagtctggacagttttgtcggctggatacggcgtttacgcggcatccggcaagaacacatggttctttgcaaacaatcccatctttctaccctggaataatcgtttatatcccttggcattacctctctttgtttacattccaacatcattttataaacattccgcttgtgtttttctttgccgtaatgataatcgctatcactgcgatttacttttctttgcatagattgactcagaaaaacgtttaagggtgggtggcatgtttgttccgtttctcattatgttgcgcgaaggacttgaagccgcgctgattgtcagtttgattgccagctatcttaagcgtacccagcgaggccgatggattgtgtgatgtggattggcgtgttgcttgccgctgcgttgtgcctgggcttgggtatcttcattaacgaaaccaccggcgaatttccgcaaaaagaacaggaactgtttgaaggtatcgtggcggtgatcgccgtggtgatccttacctggatggttttctggatgcgcaaagtgtcgcgcaacgtcaaagtgcaactggaacaggcagtcgatagcgcattgcagcgtggaaatcatcatggctgggcgctggtgatgatggtcttttttgccgttgcaagggaagggctggagtcggtctttttcctgctggcggcatttcaacaagatgtcgggatctggccgccgctgggtgcaatgctcggtcttgctactgccgtggtgctaggcttcctgctctactggggcggtattcgcctcaatcttggtgcattttttaaatggaccagcctgtttattctcttcgtcgccgcagggctggcagctggtgccattcgcgcatttcatgaagccggattgtggaaccactttcaggaaatcgccttcgatatgagtgcggtgctctcaactcactcgctgtttggcacgctgatggaagggatttttggctatcaggaagcgccgagcgtcagcgaagtcgccgtctggtttatttatctcatcccggcgctggtggcatttgctctgccaccacgcgcaggggcgacagcgtctcgctccgcgtaacaaatacgacgcaaactcttgcttagttacaacatactttaaagggatagtctcgtcatgaccattaacttccgccgtaacgcattgcagttgagcgtggctgcgctgttttcttctgcttttatggctaacgccgctgatgtgccgcaggtcaaagtgaccgtgacggataagcagtgcgaaccgatgaccattacggttaacgccgggaaaacacagttcattattcagaaccacagccagaaggcgctggagtgggagatcctcaaaggcgtgatggtggtggaagagcgggaaaatatcgcccctggctttagccagaaaatgacggcgaatttacagcctggcgaatacgatatgacctgcggtctgctgactaacccgaaagggaagttgatcgtcaaaggtgaggcaacggcggatgcggcgcaaagtgatgcgctgttaagtcttggtggtgcaattactgcatataaagcgtatgtcatggcggaaaccacgcagctggtgaccgacaccaaagcctttaccgacgcgattaaagcaggcgatatcgaaaaagcgaaagcactgtatgcaccgacgcgccagcactatgagcgtattgaaccgattgctgaactgttctccgatctggatggcagcattgacgcccgtgaagatgattacgagcaaaaagccgccgacccaaaattcactggtttccaccgtctggaaaaagcattgtttggcgacaacaccaccaaagggatggaacagtacgctgagcagctttataccgatgtggtcgatttgcaaaaacgcatcagtgaactggctttcccacctagtaaagtggtcggcggcgcagccggactgattgaggaagtggcagccagcaaaattagcggtgaagaagatcgctacagccacaccgatctgtgggatttccaggctaacgttgaaggcagccagaaaattgtcgatttgctgcgtccacaactgcaaaaagccaacccggaactgctggcaaaagtcgatgccaactttaaaaaggtcgataccattctggcgaaataccgtactaaagacggttttgaaacctacgacaaattgaccgatgccgaccggaatgcactgaaaggaccgattactgcgctggcggaagatctggcgcaacttcgcggtgtgctgggactggattaagcgttatgcagtataaagatgaaaacggcgtgaatgaaccgagtcgccgacgtttactgaaagtgataggtgcactggcgctggcgggaagttgtccggtcgctcatgcacaaaaaacgcaaagtgcgccgggtacgcttagtccggatgctcgcaatgagaaacagccgttttatggtgagcatcaggcagggatcctgacgccacaacaggccgcaatgatgctggtggcgtttgatgtgcttgccagcgataaagccgatcttgagcggttgtttcgcttgttgactcagcgttttgcttttctgactcagggcggagcagcaccagaaacgccaaatccgcgcctgccaccactcgattccggcattcttggcggctacattgcgcccgataatctcaccatcacgttaagcgtgggtcacagtttgtttgatgagcgctttggccttgcgccacagatgccaaaaaagctgcagaagatgacgcgtttccccaacgacagcctggatgcggcgttatgtcatggtgatgtgttgctacagatttgcgccaacacccaggacacggttatccatgcgctgcgcgatatcatcaaacacacgccggatttgctcagtgtgcgctggaagcgggaagggtttatttccgatcacgcggcgcgtagtaaaggcaaagagacgccgattaatttgctgggtttcaaagacggcactgccaatcccgatagccagaatgataagttgatgcaaaaagtggtgtgggtaacggcagatcagcaggagcctgcgtggacaatcggtggcagctatcaggcagtacgcttgattcagtttcgagtggaattttgggacagaacgccgctgaaagaacagcagacgatttttggccgtgataagcaaaccggtgcgccgctgggaatgcagcatgagcatgatgtgcctgattacgccagcgacccggaagggaaggtgatcgcgctggacagccatatccggctggcgaatccccgcacggcggagagtgagtccagcctgatgctgcgtcgtggctacagttatagtctgggcgtcaccaactccgggcaactggatatggggttgctgtttgtctgctaccaacacgatctggaaaaaggcttcctgacagtacaaaaaaggctcaatggcgaagcgctggaggaatacgttaaacctatcggcggcggttatttttttgcgctgccgggggtgaaggacgcgaacgattatttcggaagcgcgttattgcgggtttaatgtttttaggcggataaggcatttgtgcgcagatgcctgatgcgacgcttgcgcgtcttatcatgcctacaatcagtgcgggtttggtaggctggataaggcgttcacgccgcatccggcgatcgtgcactgatgcctgatgcaaatcctgctgaaagcacacagcttttttcatcactgtcatcactctgtcatctttccagtagaaactaatgtcactgaaatggtgttttatagttaaatataagtaaatatattgttgcaataaatgcgagatctgttgtacttattaagtagcagcggaagttcccggcagtgatagtcagtcactatggagatcgcggatggtaacgtcctgtactggacatgttttagataatcaacgcgccaccactcgcggagttttctcctccggtagtcatctcgtcactttgcattttcaacctcatcctttctttagttgtgttaccgacgccgtaaacggtgcgcgtagccgttttagcgcattttatccaaaagcaaactatggcttacaaggaagccaaccctctgatgttcgtgcgcataatcgcgctgccaacggcgcgtgtgatgaatacaaacaactcaaggtgctctccatgggaagacaaaagcagtgatcaaagctcgtcgcgaggcaaaacgtgtgctgagacgggatagccgcagccataagcagcgtgaagaagaaagcgtcaccagccttgtgcagatgggcggcgtagaagccattggtatggcccgcgacagtcgcgatactagccccatcctcgcgcgaaatgaagcgcaattgcactatctgaaggctattgagagtaagcagctgatattcgccacgggcgaagccgggtgcggaaaaacctggatcagcgcagcaaaagcggcagaggccctgatacataaggatgtcgacaggattatcgtcacccgtccagttctgcaagccgatgaagatcttggcttcttacctggagatatcgcagaaaagtttgctccctattttcgcccggtctacgacgtgctggtccggcgcttaggggcttcctttatgcagtactgcctgcgaccggaaatagggaaggtggaaattgcgccgttcgcctatatgcgtggacgtacctttgaaaatgcagtcgtcattcttgacgaggcgcagaatgtgactgccgcgcaaatgaaaatgtttttaacccgcctcggggagaacgtgacggttatcgtcaacggtgatatcacgcaatgcgatttgcctcgcggcgtgtgctccggattaagtgacgcgctggaacgtttcgaagaagatgaaatggttgggatcgtccggttcggtaaagaggactgcgtacgtagcgcactttgccaacgtacgctgcatgcctacagttaagtgtgttatcggtgcagagcccgggcgaaccgggctttgttttgggtgttcccggtgtgtgcaatatacgaaaaaaaagcccgtactttcgtacgagctcttctttaaatatggcggtgagggggggattgactcgcttcgctcgccctgcgggcagcccgctcactgcgttcacggtctgtccaactggctgtcgccagttgtcgaaccccggtcggggcttctcatccccccggtgtgtgcaatatacgaaaaaaaagcccgtactttcgtacgagctcttctttaaatatggcggtgagggggggattcgaacccccgatacgttgccgtatacacactttccaggcgtgctccttcagccactcggacacctcaccaaattgtcgttcctgtcttgctggaacgggcgctaatttagggaaatcatgacctgaggtcaacaaactttttgaaaaaatcgcgcgtttattcaaacttcaatcaatgtgtggttttaataagcgaaatctgctttttttgccaccgaccacggatttgttatgctggtggcctttgtagatcataacgataagtgcgaataaatttcgcacaacgcttttcgggagtcagtatggatatcatcttttatcacccaacgttcgatacccaatggtggattgaggcactgcgcaaagctattcctcaggcaagagtcagagcatggaaaagcggagataatgactctgctgattatgctttagtctggcatcctcctgttgaaatgctggcagggcgcgatcttaaagcggtgttcgcactcggggccggtgttgattctattttgagcaagctacaggcacaccctgaaatgctgaacccttctgttccactttttcgcctggaagataccggtatgggcgagcaaatgcaggaatatgctgtcagtcaggtgctgcattggtttcgacgttttgacgattatcgcatccagcaaaatagtagccattggcaaccgctgcctgaatatcatcgggaagattttaccatcggcattttgggcgcaggcgtactgggcagtaaagttgctcagagtctgcaaacctggcgctttccgctgcgttgctggagtcgaacccgtaaaagctggcctggcgtgcaaagctttgccggacgggaagaactgtctgcatttctgagccaatgtcgggtattgattaatttgttaccgaatacccctgaaaccgtcggcattattaatcaacaattactcgaaaaattaccggatggcgcgtatctcctcaacctggcgcgtggtgttcatgttgtggaagatgacctgctcgcggcgctggatagcggcaaagttaaaggcgcaatgttggatgtttttaatcgtgaacccttaccgcctgaaagtccgctctggcaacatccacgcgtgacgataacaccacatgtcgccgcgattacccgtcccgctgaagctgtggagtacatttctcgcaccattgcccagctcgaaaaaggggagagggtctgcgggcaagtcgaccgcgcacgcggctactaataaagcatcaggattcctgctatccttggcgggaattgaatacaggagagagttatgtatcccgtcgaccttcatatgcataccgttgccagcacacatgcatatagcacattaagtgattacattgcccaggccaaacaaaagggcattaaactttttgcgatcaccgatcatggcccggatatggaagatgcgccgcatcactggcacttcattaacatgcgtatctggccgcgagtggttgatggggtagggatcctgcgcggcatcgaagctaacattaaaaatgttgatggtgaaattgactgcagcggtaaaatgtttgacagcctggatctaattattgccggttttcatgagccggtttttgcgccacatgataaagcgaccaatacacaagcgatgatcgccactatcgccagcggcaatgtgcatataataagccatcccggaaatcccaaatatgaaatagatgtgaaagccgttgctgaagcagccgcgaaacatcaggtggcgctggaaatcaataattccagttttttacacagtcgtaagggcagtgaagacaactgtcgtgaggtagccgcagcggtacgtgatgctggaggttgggtggcattaggcagcgattctcacaccgcgtttaccatgggggaatttgaagagtgtcttaaaatcctcgacgcggtagattttccgccagagcgcattttgaatgtttctccgcgccgcttactgaacttccttgaatctcgcggtatggcaccgattgcggaatttgcagacctttaattactagtaatggaaatatattaatgaacgagttttctatcctctgtcgtgtgctgggtagcctctattaccgccaaccacaagatcctttactggtgccgctgtttaccctgattcgtgaggggaaactggctgcgaactggccactggagcaggatgagttgctgacacgtttgcagaaaagctgtgatatgacgcaagtctctgccgattacaatgcgttgtttatcggcgatgaatgtgctgtgccgccatatcgtagcgcatgggttgagggcgcgacggaagcggaagtgcgcgcttttctttctgagcgagggatgccattagcggatacgccagccgatcacatcggcacattgctgctcgcagcttcctggctggaagatcagagtacggaagatgagagcgaagcactggaaacactgttcagtgagtatctgttaccctggtgtggtgcgttccttggcaaagtggaggcccatgcaaccacgcctttctggcgcaccatggcaccgctaacccgcgatgccattagtgcaatgtgggacgagctggaagaagattctgaagaataagtgtgatctacgtcactcataactgcaacggataatttgttgttgcataaaatgtgtgctcgatctcattcatggccgcgttttctgctatcatgcgcggcatgaacatacttctctctattgcaatcacaacaggcattctctccggtatctggggatgggtggctgtttccctgggcttactaagctgggcgggcttcctgggctgtacggcctactttgcctgcccgcaaggtgggctgaaagggctggcgatctccgctgcaaccctgcttagtggcgtggtgtgggcgatggtcattatttacggtagtgcactggcaccacatctggaaattctcggttatgtcataaccggtattgtcgcgtttctgatgtgtattcaggccaaacagctgctgcttagttttgttccggggacgtttataggcgcatgcgcgacgtttgccgggcagggtgactggaaactggtgttacctagcctggcgcttgggctgatatttggttacgcaatgaaaaacagtggcctgtggctggcggcgcgtagtgcaaagacggcgcaccgtgagcaggaaatcaaaaataaagcgtgaggggcactcacgctttcgcttaaacagtaaaatgccggatgataattccggcttttttatctgtcaggattccggtggaacgctcatatggcggtatttcaccagaatgtcattctgccgttctgctttattttgcaaatcccacagaccacggtcgataccatcattaatcaggaaaatgacccctgtttcgatagcgctcatcaggcacagcataacaggttcgttgctggtgtaacccacttccccttcaagcaagcgctggtagtcaataaagcggaaaaccccggcctgaacttcataggaaagtatcgtcttactggtgttcacgctagaaaggatctcgccggtactcacattgacgacgcgcaggttcacggcaatctgatcgagctggtattgcgtgtcggcaccgatgccaaaatatcttgccccaaccccgccagatttgacgttgctttcataaccgataatgctaccttcaaccatgatatttgccgccgttaaagattgcagcgggattcggttattaatggcaaccgtgccgttttcttgtgccgcacgaataatcttgcgctcgttaagcaggttttgtaagccctggcgctccagcggtataaaccagcgagaatctttcagtgccgtgaccagcattgccgtggcgctttgcggaacagcagtggagaagttacttgccgggtagggtttaaattgcccggtttcgtcctgaatgttgtatacgctaacaaagattttacccgtcggcgctggcagatgggtcaaatctttgtagctctgagcacgaggcattaatgtcggtctggcggcttctttaggcggggcggttaagcatccgctcagtaacatgacggcaaccaaaagaaataagcgctgcatgattattttccttatgaagctggggcttaaaaatcggtactgttattttgtaaaccgctaacctggatggtgctggtttgtccggttttacgatctgtcacgttcaactgcaattgaccatcgcggttggcaatatcgacaatataatcgttggtcaccatgcggcccggtttaccggtattaatattgctcagtagcccacctaaaatttgactctggatggcctgagtaaagttatctaacgcactgggtgtttcaataccaaagtcatcgttatagctcggatctttataagagttttgggcctgagcgctatttaataaaaaagcgccattatttgggttaccaccaaagtttggattacggaactggaaagtcatggttccagcccaacttaatgggctaataagcatgagtagaactactgcatgtttgacacgcattgcagcctccgaacaattttttatttagaattcatcatgcgccaaatcgcccgtacttaataacgcctgatttatctggcgacgatttagtgcttcttcagtttgaatcagtgcaaagacgacagttttctcgaagtctcttttcaacggaaataaaaaagtctggaaaataacgtcctgattgaccgttatagtgatccagcttccccatcgtgcactgggcctttcattaatcgttaagttacccgtatagtcactttcccatttatcactaaaggctcggtaaaaatcatggccaatagaactaacagtatggtcagttagcaatcccgggacttctacctcaacggcgtgaagattccctgcggcgaacagaaattctgccgccacaatccagcgtaaataacgtttcatggctttatcgcctgaggttatcgtttgcccaggaaaccgcttgtgtccggttttttacggctatcttcttgaaaagattataaagatgcgttttaaccgtattttcgctgatgaacaagctacgagcgatctcgttattagacgcgccgatacgcagcttattcaggatctctttttcccgatgagtaaggagggcactttccgtgctgttataacgatagttaccactatgcgtaatcaggtagctggcaagcttttgcgtaaagtagcattcgccgcgcaggacgccttgcaacccattgacaacacgttcttgatcctccatggaataaaaaacgccgttgatatgaggccagttttcaatgtcgcggtacgggtaatcttcaggcgtatttagcaacaatattttgatattgttgtttttcctgctcaaagtatcctgccaataatggataagctttttatccgcttccatcatatccagaagaataatagagccactagagatatcgtccagagaacgttgaatattatgtaattttcctgtaattgccaggctttgtttaaggtgctgcaagagagctgtcgcctgcaaagaagatttagtgatcaacaataatgtatgaccatgaatactatggacttcattaaacatgatgaaaccccgctttttttattgatcgcacacctgacagctgcctctaaaatagaagcaccagaagtactgacagatgttgcactgctgtgtgtagtaataaatcagccctaaatgggtaaaatataaaactaatggattacatctgatttcaatctagccattacaaatcttaaatcaagtgttaaacatgtaactaaatgtaactcgttatattaaaatgttaaccttaaggttttattaagtttagaaatgatagaaaagttgtacatttggtttttattgcacaattttaaaaaatcatacaaatggtgataacttactaataatgcatataaaaaatatttcggtgtagtcctttcgtcatgtaaaacgttcttgttttttctccacacctccgtggacaattttttactgcaaaaagacgaggtttgtcacggcttgtgcgcaagacatatcgcagcaatcagcgacgggcaagaagaatgactgtctggtgctttttgatagcggaaaacggagatttaaaagaaaacaaaatatttttttgcgtagataacagcgtatttacgtgggttttaatactttggtatgaactaaaaaagaaaaatacaacgcgcgggtgagttattaaaaatatttccgcagacatactttccatcgtaacgcagcgttaacaaaatacaggttgcgttaacaaccaagttgaaatgatttaatttcttaaatgtacgaccaggtccagggtgacaacatgaaaaacaaattgttatttatgatgttaacaatactgggtgcgcctgggattgcagccgcagcaggttatgatttagctaatagtgaatataacttcgcggtaaatgaattgagtaagtctagttttaatcaggcagccataattggtcaagctgggactaataatagtgctcagttacggcagggaggcagtaaacttttggcggttgttgcgcaagaaggtagtagcaaccgggcaaagattgaccagacaggagattataaccttgcatatattgatcaggcgggcagtgccaacgatgccagtattagccaaggtgcttatggtaatactgcgatgattatccagaaaggttctggtaataaagcaaatattacacagtatggtactcaaaaaacggcaattgtagtgcagagacagagccaaatggctattcgcgtgacacaacgttaatttccattcgacttttaaatcaatccgatgggggttttacatgaaacttttaaaagtagcagcaattgcagcaatcgtattctccggtagcgctctggcaggtgttgttcctcagtacggcggcggcggtaaccacggtggtggcggtaataatagcggcccaaattctgagctgaacatttaccagtacggtggcggtaactctgcacttgctctgcaaactgatgcccgtaactctgacttgactattacccagcatggcggcggtaatggtgcagatgttggtcagggcagtgatgacagcagtatcgatctgacccaacgtggcttcggtaacagcgctactcttgatcagtggaacggcaaaaattctgaaatgacggttaaacagttcggtggtggcaacggtgctgcagttgaccagactgcatctaactcctccgtcaacgtgactcaggttggctttggtaacaacgcgaccgctcatcagtactaatacatcatttgtattacagaaacagggcgcaagccctgttttttttcgggagaagaatatgaatacgttattactccttgcggcactttccagtcagataacctttaatacgacccagcaaggggatgtgtataccattattcctgaagtcactcttactcaatcttgtctgtgcagagtacaaatattgtccctgcgcgaaggcagtagtgggcaaagtcagacgaagcaagaaaagacccttagtttgcctgctaatcaacccattgctttgacgaagttgagtttaaatatttccccggacgatcgggtgaaaatagttgttactgtttctgatggacagagtcttcatttaagtcaacaatggccgccctctagtgaaaagtcttaatttgttgaaatatcgagcataagatgaatctggagagaatggtctgctgcgaatcagccaacctgaaagtatggataacacaaccctcaaggatgactaatcattgaggaaatagaataaatgttcagaccttttttaaactctcttatgctcggcagtttgttttttccttttattgccattgctggaagcaccgtgcaagggggcgtgatccatttttatggccaaattgtggaaccggcatgtgacgtcagcacccagagtagtcccgtagaaatgaactgcccacagaatggttctattccgggcaaaacctactccagcaaagcgttaatgagcggcaatgtcaaaaacgcgcaaatagccagtgtaaaagtgcagtatcttgataaacagaaaaagctggctgtaatgaacatcgaatataactaagtttctgaacaactcacgttgctgagcagaaaaatgcgatttaaccaaaaagcctgctgtacacttaagaaacaagaaggtgtaaggaggcgttatgaaaacgcgtattcatgttgtgcagggtgatattaccaaactggccgttgatgtgattgtgaatgcggctaatccgagtttaatgggaggcggcggcgtcgatggggccattcatcgcgcagcgggtccggccctgctggatgcttgtttaaaagtcaggcaacagcagggcgattgccctacggggcatgccgttattacgcttgcaggcgatcttcccgctaaagccgtagtgcacaccgtcgggccagtctggcgtggtggtgaacaaaacgaagaccagcttttgcaggatgcctatctcaatagcctacgactggtggcggcaaacagctatacgagtgtggcttttcctgcaatcagtactggggtttatggttaccctcgtgcggcagcggctgaaatcgcagtaaaaaccgttagtgaatttattacccgtcacgctttacccgaacaggtatactttgtctgttatgatgaagaaaacgcccacctctacgaaagactccttacccaacaaggagatgaatgatttgccccggctggcgagcgcggtgctgccactgtgtagccaacatcccggtcagtgtggcctttttcctctggagaaaagtctggatgcgtttgccgcccggtatcgtctggccgaaatggcagagcatacgctcgatgttcagtattacatctggcaggacgatatgagcggtcggttactgttttccgccctgttagccgcagcaaagcgtggcgttcgcgtccgtttgttgctggacgacaacaatacgcccggacttgacgacattttacgcttgcttgacagtcatccacgcattgaagtccggctttttaatcctttcagctttcgcttgctgcgtccgcttggttatatcaccgacttttcccgtcttaatcgccgtatgcacaataaaagtttcactgtcgatggcgtggtgaccctggtgggaggacgaaatattggtgatgcctattttggagcaggggaggagccactttttagcgatttagatgtcatggcaataggacccgtggtagaggacgttgccgatgatttcgcccgctactggtattgcaaaagcgttagtcccttacagcaggtgctggatgtcccggagggtgaaatggcggatcgcatcgagttacccgcctcctggcataacgatgccatgacgcatcgttatttacgcaaaatggaatccagtccatttataaatcatctggttgatggaacattgccgcttatctgggcgaagacacgtttattaagtgatgatccggcgaaaggggagggcaaggcaaaacggcatagtctgttaccgcagcgcctgttcgatatcatgggcagtcccagtgaacgcatcgatattatctcttcctattttgtaccgacacgcgcaggtgtggcgcaactcttacggatggtgagaaaaggggtaaagattgcgatcctaaccaattctcttgccgctaacgatgttgctgtcgtccatgccggatacgcgcgctggcgcaaaaaattgctccgctatggcgtggaattatatgaactcaagccgacgcgtgaacaaagtagtacgttacacgatcgcggcataaccggtaattccggagccagcctgcatgctaaaacctttagcatcgatggtaaaacggtgtttatcggctctttcaatttcgatccgcgtagtacattgctcaatactgaaatgggcttcgtgatagagagcgaaacgctggcacagttaattgataaacgctttattcagagccagtatgatgcggcctggcagctccgtctggacaggtggggacggatcaactgggttgatcgtcatgcaaagaaagagattattctcaaaaaagaacccgccaccagtttctggaagcgggttatggtcagactggcgagcatattgcccgtggaatggttattgtaaatgtggcttaacgggctggtgctttatcgttctcacgcttaacaaccggtttaccagagaacaaaaacttcagtaacgggatgcgcaaatgaatttcatacagaattatcgcaatccctactacaaatatcaggccacagagaaaaccaagccagttggaggtgatgtgcggtgtaatgtatgcgccgaaaaacagcgttaacgggtggtgaaccagatagataaacaggcttgcgttaacaaaataagtcacccgcgcactctggaagttaagcaaacggtggccaaaggagaagaccacattcaccatccacagaccgaggaccatggtgatcacgctctcggtttcgtacatccaggcatcgccactgccatagcgctggttgagtaaataagcgacaaacgccaatgctgctgcaagggtacagccacgagacggcgtggtaaacaaggctttaagatgagggaaaatgaaagccagtgcgccgaggataaagaacggcaaataaaacagcgtttgcatgacaataaaattgaacatgccattactcagaatgggcggatacacaataaaaatcgttcttcttattaccgcataaccgatgccgaggcataaaaaaatcacgcttagttttaccatgctgaattttttattcgttttatcagaattttctaaattatttctgatgcgcttaaatatccatacgcacagcgtcgtcatgaccactaacaccagtaaaaaccacaggtgacttattaattcccaggccaacgtattatatttgtcatacaaactcagcccaggccaactttccgcttttcctttgacatattgcagcataataaattgcggtaatgtcagtagggggatggctgttaacatcgggatacctacacgttcgacacgtactttccaccattttttcaagggatagcgtaaaaaaagcatgtaggaaaagtagccggatataacgaaaaatacctgcatgcggaagctgtggatgaagtcattaaaaagggtcagccacaaactactttcggcgctattcacatgccatgtatggctgctatagattaaagaaatatgaaaaggtatccctaacaacatcagccaggcgcggatggagtcgaggaaatattcacgttgcgcgggtactgggttcatatatggttaactaatctcggatttttcgtcttatccctgtcgggttatgcctttaggcttgttgccatagtgacaccgacctgaccgcgccaggcgcaggcttcaaggtttttatgcatagcatcatcgctaccactaaccagaatggaagcgtctgtaagacggttgataaataaatttgctggcaaaccctacacgaagtcgatgcttctgtctttaggagaagcacggaaagtgaaaacggttgcaatcaggtgcttaatccatgagccagcgtgctgaacgataccgggattctgttgtcggaatggctggttatccattaaaatagatcggatcgatataagcacacaaagggggaagtgcttactaattatgaaacataaactacaaatgatgaaaatgcgttggttgagtgctgcagtaatgttaaccctgtatacatctagtagctgggctttcagtattgatgatgtcgcaaagcaagctcaatctttagccgggaaaggctacgagacgcccaaaagcaacttgccctccgttttccgcgatatgaaatacgcggactatcagcagatccagtttaatcatgacaaagcgtactggaacaatctgaagaccccattcaaactcgagttctaccatcagggtatgtacttcgataccccggtcaaaataaatgaagtgactgccaccgcagtcaaacgaatcaaatacagcccggattatttcactttcggcgatgttcagcatgacaaagatacggtaaaagaccttggctttgccggttttaaagtgctttacccgatcaacagcaaagataaaaacgatgaaatcgtcagcatgctcggggccagctatttccgcgtgattggtgcaggtcaggtttatggcctttctgcccgcggcctggcaattgataccgccttgccaagcggtgaagaatttccgcgcttcaaagagttctggatcgagcgtccaaaaccgactgataaacgtttaaccatctatgcattgcttgacagcccgcgtgcgacaggtgcttacaaattcgtggttatgccagggcgtgacacggttgtggatgtgcagagcaaaatctatctgcgcgataaagtcggcaaactgggggttgcaccgttaaccagtatgttcctgtttgggccgaaccaaccgagccctgcaaataactatcgtccggagttgcacgactctaacggtctctctatccatgccggtaatggcgaatggatctggcgtccgttgaataacccgaaacatttagcggtcagcagcttctccatggaaaacccgcaaggctttggtctgttgcagcgcggtcgtgatttctcccgctttgaagatctcgatgatcgttacgatctccgtccaagcgcatgggtgactccgaaaggggagtggggtaaaggcagcgttgagctggtggaaattccaaccaacgatgaaaccaacgataacatcgtcgcttactggacgccggatcagctgccggagccgggtaaagagatgaactttaaatacaccatcaccttcagccgtgatgaagacaaactgcatgcgccagataacgcatgggtgcaacaaacgcgtcgtagtacgggggatgtgaagcagagcaacctgattcgccagcctgacggtactatcgcctttgtggtcgattttaccggcgcagagatgaaaaaactgccagaggataccccggtcacagcgcaaaccagcattggtgataatggtgagatagttgaaagcacggtgcgctataacccggttaccaaaggctggcgtctggtgatgcgtgtgaaagtgaaagatgccaagaaaaccactgaaatgcgtgctgcgctggtgaatgccgatcagacgttgagtgaaacctggagctaccagttacctgccaatgaataagacaactgagtacattgccgaagactgatatccgcgccgttcatcaggcgctggatgccgaacaccgcacctgggcgcgggaggatgattccccgcaaggctcggtaaaggcgcgtctggaacaagcctggccagattcacttgctgatggacagttaattaaagacgacgaagggcgcgatcagctgaaggcgatgccagaagcaaaacgctcctcgatgtttcccgacccgtggcgtaccaacccggtaggccgtttctgggatcgcctgcgtggacgcgatgtcacgccgcgctatctggctcgtttgaccaaagaagagcaggagagcgagcaaaagtggcgtaccgtcggtaccatccgccgttacattctgttgatcctgacgctcgcgcaaactgtcgtcgcgacctggtatatgaagaccattcttccttatcagggttgggcgctgattaatcctatggatatggttggtcaggatttgtgggtttcctttatgcagcttctgccttatatgctgcaaaccggtatcctgatcctctttgcggtactgttctgttgggtgtccgccggattctggacggcgttaatgggcttcctgcaactgcttattggtcgcgataaatacagtatatctgcgtcaacagttggcgatgaaccattaaacccggagcatcgcacggcgttgatcatgcctatctgtaacgaagacgtgaaccgtgtttttgctggcctgcgtgcaacgtgggaatcagtaaaagccaccgggaatgccaaacactttgatgtctacattcttagtgacagttataacccggatatctgcgtcgcagagcaaaaagcctggatggagcttatcgctgaagtcggtggcgaaggtcagattttctatcgccgccgccgtcgccgcgtgaagcgtaaaagcggtaatatcgatgacttctgccgtcgctggggcagccagtacagctacatggtggtgctggatgctgactcggtaatgaccggtgattgtttgtgcgggctggtgcgcctgatggaagccaacccgaacgccgggatcattcagtcgtcgccgaaagcgtccggtatggatacgctgtatgcgcgctgtcagcagttcgcgacccgcgtgtatgggccactgtttacagccggtttgcacttctggcaacttggcgagtcgcactactggggacataacgcgattatccgcgtgaaaccgtttatcgagcactgcgcactggctccgctgccgggcgaaggttcctttgccggttcaatcctgtcacatgacttcgtggaagcggcgttgatgcgccgtgcaggttggggggtctggattgcttacgatctcccgggttcttatgaagaattgccgcctaacttgcttgatgagctaaaacgtgaccgccgatggtgccacggtaacctgatgaacttccgtctgttcctggtgaagggtatgcacccggttcaccgtgcggtgttcctgacgggcgtgatgtcttatctctccgctccgctgtggtttatgttcctcgcgctctctactgcattgcaggtagtgcatgcgttgaccgaaccgcaatacttcctgcaaccacggcagttgttcccagtgtggccgcagtggcgtcctgagctggcgattgcactttttgcttcgaccatggtgctgttgttcctgccgaagttattgagcattttgcttatctggtgcaaaggaacgaaagaatacggcggcttctggcgcgttacattatcgttgctgctggaagtgcttttttccgtgctgctggctccggtacgcatgctgttccatacggtcttcgttgtcagcgcgttccttggctgggaagtggtgtggaattcaccgcagcgtgatgatgactccacttcctggggtgaagcgttcaaacgccacggctcacagctgctgttagggttagtgtgggctgttgggatggcgtggctggatctgcgtttcctgttctggctggcaccgattgtcttctcgttgatcctgtcaccgtttgtttcggtgatttccagccgtgccaccgttggtctgcgcaccaaacgctggaaactgttcctgatcccggaagagtattcgccgccgcaggtgctggttgataccgatcggttccttgagatgaatcgtcaacgctcccttgatgatggctttatgcacgcagtgtttaacccgtcatttaacgctctggcaaccgcaatggcgaccgcgcgtcaccgcgccagtaaggtgctggaaatcgcccgtgaccgccacgttgaacaggcgctgaacgagacgccagagaagctgaatcgcgatcgtcgcctggtgctgctaagcgatccggtgacgatggcccgtctgcatttccgtgtctggaattccccggagagatattcttcatgggtgagttattacgaagggataaagctcaatccactggcattgcgtaaaccggatgcggcttcgcaataaaaacgtagttgcctgatgcgctacgcttatcaggcctacatcgttcctgcaatttattgattttgcaagactttgtgggtcggataaggcgttcacgccgcatccggcaaaaacaacgagccaataaaaataccggcgttatgccggtatttttttacgaaagaggtatcaaatgcgtttaattgtggtgagcatcatggtgaccttgctgagtggctgtggcagcattattagtcgcactataccggggcaggggcatggcaaccaatattatcccggtgtgcaatgggatgtgcgtgactccgcctggcgttatgtcacgatccttgatctgccattctctctggtttttgatactttactgctgccgatcgacattcatcatggcccgtatgagtgattaacgttcatcccactcatcagctgctgcgcgtccttcctcggtatccagcggtggctcaagctgaaattccccctcgtcccattcatgtaatgtattctcttcctgccactcctggcgtatctctatctcatcatagtcgccatcaaaaacactttgcgcggcttcaccgctaagcataggtaaacattcaccttcttccccttcgtcggcaaaaaactcaacttgccacatgatgtcgccgtcctgcaaaacgtatttttgggcattgaactgttgcacattcgcatcttcggcgtcgatgccggggttgtctgcaagaaattcttcgcgtgcagcgtcaatggcttcttcaagcgttgcgtacatggtcatcacgattctccctttgagttgatgaggtttcagggaaaaggatagctgattctccgcttttgcaagtatgaaaggcgaaaaatcagttgcttacctggggtattcgacgacgacgtagactgttccaactatagactgcgttgaataacactacgccagcggtgacgagaaataccgctctgaaaccgtagttcgcactaatcgctgctcccatcaatggtccggtaacgttgccaatatcacgaaagctttggttatagctgaagatacgcccggcgatctggttgctgctgttgtaaaccaacagtgtctgtacggcggggagtagtgcaccatcggcggcaccgagcaaaaaacgtaaaatcccaagttgcaatggcgtctgaacgtaagacattgggatcaacagcagtacagaaaagatcagcgctgtaatcaggatcttttcgggtccgattcgatcgccaagtttgccgagtcgtggtgcacttagcagagccgccacgcctggcacgctggcgatcatgccactgataaaggcgacgttactgacgttacccgccagttcgcggacatacagcgtcagaatgggggcaatactgcccgtcgccacctggatgattaacgtagtgacaaacaggctgagtaccagtttcgggtttttaagacttgtcaccacttcccgcatgtgcagcatctcttttttgctgaccggctggaatttttctctgatgcaaaacagggtgacgaaaaagcagagtatgagcacactggcggtaataaagaataccggacgtaagccgtagctatcggcgagcaggccgccagccattgggccgagcaacgcaccactaacgccgcctgtggagagcgtacccagcgcccagccgcttttattacgcggtacttgtgtggcgataagagcattagcgttggggacaaatccgccaagtaacccaagaagcgcccgcaggatcaaaaactgccagatattttgtgccagccccatcaacaccatcacgatgcccatgccgagggcagagcgtaatagcatgagttttcggcctttacggtcggcgagtccaccccaaaacggactggcgatggcgctaaataaaaatgtaatgctgaagacaataccggaccacatattcagggcggagtgaccggtaacgccaagctgctcaacgtagaggggtaagaagggcattaccagactgaaggcggcaccggtaagaaaacagcctagccaggcgacgatcaggtttcgtttccagtttataggggtgtcattttcacagggactcatagcaatccgctgttggtgcgccaggcgcggtgaacataagaagaaaagataagcacactaattatgcgcccgacttccagggggcgcaatccagagagcttttatcgctaaatcagggggatttgctgtggtaatgccggatgccattctgaagcatccggcatgggagatttaatagcgactaggaacgccttccgggcgtgttttaaagcgacggtgtaaccacatatactgctctggtgccatcatgatgcatttttcgaccactttgttcatccacgcggcggtagtttcggcatcatccagtggcggagaacactctggcggcagcataatcaattgataccctttgccatctggcttacggcgtggaacgaagggcaccagacatgcgccggacatccgtgccagcatccaggttccggtcgtggtcgcagcctgctcaacggcaaacaacgggacgaaaacgctactgcgcgggccgtaatcatgatccggtgcgtaccagaccacttcgccttttttcagggctttaatcatgccttttaaatctttgcggtcgagcatgcttttattactgcgcaaacggccccaggtttgtagccagtcaatcagtggattatcgttcgggcgataaacgccaatacccggttcctgcataccaaactgccgcgcacccagctccagtgtcagaaaatggatgccaactaacaggatgccgcgtttttgcgcctgcacgtcacgaatgtgttccatgccgatcacttccgtccagcgggcgattcggcggtccggccagaaccacgccatgccggtttccatcaggcccatgccaacggattcgaaattcttcaccaccattttacggcgttcttgttcgctcatttccgggaagcacagttccaggttgcgatgcacaatttttgcgcgtcgtttcataaaacgtaacgccagttttcctaatccacaaccgaggcggtagataaccgggtagggcaattgcacgactaaccaaagtacgccaatacccaaccaggttaaccaataacgcggatgaagcagtgcggtggagaacttgggtagattcgtcatatcaatcctgtttttcaacctattcgggcaattgtatgtattgtcgcattttttcgcccgcaaccaaaatttgtggctgaagactgggcgaaattgccgcgcttgtaaataacaaataatttttaatgcgcaaatgtagcgtaaaatgtgtggatgttaattatcgataattgctatatcatgccgcggatttttactttcccatctcgcaggaaccgtacaccatgccagtgttacacaaccgcatttccaacgacgcgctaaaagccaaaatgttggctgagagcgaaccgcgaaccaccattagcttttacaagtatttccacatcgccgatcctaaggcgacccgtgacgctttatatcagctgtttaccgcgctgaatgtttttgggcgagtgtatctggcgcatgagggcattaacgcgcaaatcagcgtacctgcgagcaatgttgaaacatttcgcgcgcagctctatgccttcgacccggctttagagggtttacgcctgaatatcgcgttggatgatgacgggaaatccttctgggtactgcgcatgaaggtacgcgatcgcattgttgccgacggtattgacgatcctcactttgatgccagcaatgttggtgagtatctgcaagcggcggaagtgaacgccatgcttgacgatcccgatgcactatttatcgacatgcgtaaccactatgagtatgaagtggggcactttgaaaacgcgctcgaaattccggcagataccttccgtgagcagctgccaaaagcagtcgagatgatgcaggcacataaagataaaaaaatcgtcatgtactgcaccggcggcattcgttgtgaaaaggccagtgcctggatgaaacataacggattcaacaaagtctggcatatcgagggcggaattattgaatacgcccgtaaggcgcgcgagcagggcttgccggtgcgttttattggcaaaaattttgtttttgacgagcggatgggcgaacgtataagcgatgagattatcgcgcattgccaccagtgcggcgcgccgtgcgacagccataccaactgtaaaaatgatggctgccacctgctgtttattcagtgtccagtatgcgcggaaaaatacaaaggttgttgtagtgagatttgctgcgaagaaagcgcgttaccgccagaagaacagcgacgccgtcgggcaggacgtgaaaatggcaataagatctttaataagtctcgtggacgtctgaatacaacactgtgcattcctgatccaacagaataaatatcattgccggatgcgtgccatccggcaacatttcacgcttacttctgctgtacgccttccacactaataatcagatccacttcctgagaagctggacctaaatctgtcttgatattgaagtccttgagcttaattttgccttcggcctcgaagcctgcacgtttaccaccccatgggtcgtcgccctgaccaattaatttcgcttccagcgtgacgggtttggttacgccattcagcgtcagatcgccggtaatatccagttcgtcaccgtctttcttcacgctggtggaggtgaatgttgcctgtggatattttgcggtattgaggaaatctgcactgcgaagatgtttatcgcgttcggcgtgattagtatcgacgctggtggtgttaattgtcacattcactttatcggcagccggatttttttcgtcaaaggtaaaagtaccgtcgaaatctttaaaggtgccgtataaccagctatagccaaggtgctggatgcggaaattaacaaaggcgtgctgaccttctttgtcaattttgtaatcggcggcaaccgcactaccggcagagaacatcagggacgcgaaggttaaaccaagcaggctttttttcattttttatactccatagtcagaactgctctttcccagcatgcgcttcagagtgtcgtctttatcgatgaaatgatgcttcagggccataaatccgtgcataacggacagtactacgacgctccacgcgagccaaaaatgcagggcaccggcaaagtctgcctgtgcgccagcgtcggcaagggtcgcggggacgtcaaaccagccaaaaacgctgatcggtttaccatcggcagtactgatcagatagccgctgatgccgatggcgaaaagcaataggtacaatgcgagatgtccagctcttgcggcaagacgagtcatggggctataactcggcagcggacccggcggtggagatatgacacgccacagaacgcgaataaccagccccatcattaacaaaataccgatgcttttatgcagttcgggtgctttgtgataccagccatcgtaataactgagcgtgaccatccacagacctaaagcaaacatgccgtagacaataattgcgcttagccaatggaaggccgcagatataacaccatagcgttcaggggtatttgtgaaactcataagtgcatccaaaacgaatttgcgagagaaagaaaatggcgtgtcggagaatgaattgcaacacaaaaataacaaattgaatgatatttatttttatttcaataattttgaattaataatgaaagaatcttcataagtttagtgggttcagcatcagagatgtctggtgagtgctgtagaagcaggaataatctcattcaatttttcacgctaaatgaaagggagattaaatatttgtcagtttatgtcagtgcggaaaattaaaaataaaacacatagatcagatccataattgccaacaatccccagagaaaaagataaagcatcagatgctcgcgaatattattgatgagatagtgcaacagccgacgcattaaatactcctgtaaaaacggcctcattctggaggccgtaatgatgattattggaagcgggaaagcctgaatggcgtcaaatcaaaatcgctttttttgtcttgcgcaaaatcggcagctatttcccctaaaacactcgcaaatttaaaaccgtgcccactcaggccggtaatgagcagtgtattatcgtggccgggtagggtatcgataataaaatcttcgtcagggctattatcataggtgcaggcagcgccgtacaggcagcaaccgatacccggcaatacattgcgcaagaacgggaaggcttcactcccatcactggccacttccgcaaacggaacacgttcatccgcactatggataacctggcctccgttatgtttgccaatcttcaacgcgtcgttttctgccggaaaaccataatattgatcgccattgggcagttcaccggtaaacgccgggaatttattcttcacgctatagcggccatcggcctgataccaggcaaatactttgcgtacgggctggacaggcagctccgggagcaggtcttttacccatgttcccgcgcagacaatcgcttttttcgcctgatactcaccgtcagccgtttcaatagttacgccatcatcgtcatgacgaattgcggtgaccgggcagttgaacagttgcgcacagcccgcttccttcgccagttggatccaggttttaatcgccagttcgctgcgcaaaaaaccggaatcagtttcaaataagccgatgtagttgtccgggacgcgtatttccggccagcgggccataatcccttgcgcatcgagcttttcaacgttgagttgccattgttcggcgctgtgggcgacgttggcgagaaatgtggaatcagccgggccaaggttaatgacgccagagcgtacaaaaatgggatcttcttcgttgtggcgggagagttcatcccacagcgtttgcgcgcggaggaccagcgggacatacttttcgccttcaccataagcatggcgaattaatcgcgtatcgccgtggtggctgccgtgttgatgcggtggcatatgggcgtcggtcattagcacgtttaaaccggcgcgggttgcataatacccggcggcagcgcctacggaaccgctgccaataatgatgagatcgtatttcatttttttctctctgctctcatggtttaagcagagtaattaactgaatgcagatatacaacccagaaatggtaaaggcaccggtgaggtgccttttgggtggatggtcatgtcatgttaatgacgccgatactcgtttacctggaaatcaccggattcaattttggcgattcctgcttctaatatgctaataaattgtctggcaacatcagtggttaaccagagcgtctgaccaacttcagtcccttcctgctcggacttatttggggtctggtagtgcaaacgcaacatcagcgcatcatagctatcaacggtgctgatgtcccaccctacgagcggatgagtctgaatgacttcattatttttttccatcatggccccctaattcgtgttactagacaacgttattcgaggttcaatgcgtttttatctgaagcaacttcagtataccaataagtaagggtattcaccgaatttttaaagggggaaacagataaatttctgcttttaagatttatatgaacaataaaacagcatgtcattcatatttttttagcatattgtgcaattattttgaggaagtgtagaaattttgtactcaaaattcgtaagtaaaataaaaaagccggggcgacccggcaaaaaaaatcactgcatattattcgctgacaaaccagtcatcggcgctttcccacgtttcctggagaatttcactaatgcgctgtttatcttcttttgtcgcgccaataacgcttaaattattcgctgcggcataacgtacgcttacgtggccttcattatcaggaaacgcatactgaatacggcgggaaagttcgccagccagggcgtcaatagccccagctggcaatggagaagttttcgctatggtgacttcaattcgcataatagccccctgttgaatatactggttatttatacaggtaaaataacctaatgacaacaggaagctacgatttttattgtttaacggaccagcgtaccgtttccccggcgaggaatggcaccagcgtgtcatcagtcagtgcgatgctttcagcaacctgttgctcttcacgtaccagttcgatgaatgtgtcgttgaccggcaacccatagaactgcgggccgtttacagaacagaatgcttcaaagtgctgcaaagcattcatttcttcaaagacggtagcgtaactgcccagcgcggttggggcgttgaagcagcccgcgcagccgcaactgctctctttgcgatgacgtgcatgtggcgcagaatccgtaccgaggaatactcgattaaaaccgctggcgaccagttcacgcaatgcctgttggtgaatattacgtttgaggatgggtagacaatacaggtgcggacgcacgcctccaaccagcatatggttgcggttaaacatcagatgctgcggagtgatggtggcagccagccgttcatttccgtcacggacatagtcggcagcatctttggtggtgatgtgctcaaaaacgactttcagcgcagtcaggcgctggcgcagaggttccatcacgctttctataaagcgcgcttcacgatcaaaaatgtcgatatctgcatgtgtcacttcaccatgcaccagtagcggcataccgattttttccatgcgctcaagtaccggcatgattgcgtcaatactcgtcacgccgtggctggagttagtggttgcgtttgccgggtaaagttttgcagcggtgaacacgccttcgttaaatccgcgctccagctcattaggatccaggctatctgttaaataacaggtcatcaatggggtgaaatcgtgcccggcaggtacggcgtcaagaatacgctggcgatacgccacggcagcctcaacggtggtcacgggcggagccagattgggcattacgatagcccgtccataaatttcgctggtatatggcacgacagtttttaacatgtcgccatcgcggaggtgaaggtgccagtcgtctgggcggcggatctttaatacctgggatggtgcagtcattaatctctatgctccggctgaagggatgtttttgccggacacaaaggataagcggaaacgttttcctttgcacgaaaaataaagggcgcgaatgcgccctcgtgattaatcagtaaatggaatgacaatttcgcctggcttcacttcaatgcctttcgccagttttttcgccattgcttcgccctggctgccatcttcgcgcaggacgtaagcaggttgctggttaaagtaattgcgtaatgcctggttcaaatagggaagcaacgtttgcatcaccgtttgcattttttccggttgtaccgtcgcatcgaccacttccatctctttcaggaagatcgcacctttttctttatcaaacacgggcagcgctttcagcttcagtttcatggtcgctttctgactaccgaacagggagttcatgtccagattggcgtctccggttagggtaaccttattcggctcttcgcgaccaatttggctggtcaggtttgtcagaacaatatgggcgtcagccacgccgggtaaaccgatatctttactgaaattattatgtttcgcaaggctctggttaatttcttgttcggtgatggtgtattgggtgagttgattacagccaacgagcaggccactgacgatcaatgcagcggcaaataaaaacttgttcatggtagtcctcgacatgaaatctgcgtcaatatcctgacacaacgcagcatgtgtcaccagcgataaactcgccagcagaaaaaactgaaaacggcggcaacccgcgaatacaggctgccgcggcgggtcaggattaaatcgccatactacttaacaaattgatttgtgtctgtttcgccatattatcgcggtaatcagcaacgcggcttggccagttaattccggctaccagcgtcagattacgcagtagcgggaatagctgaatatcatcttcgctaagttcgccattcacggcgttcggtttgacgatcagtttgtccagcgcacgtaaatcatcgctgatattcttaatcagaccgtcagagtgggccagcaggtcggcaaaattacccgcgctggcctctttcttgtcgacgaaatatttgcgcgcggcgggagtagaaaactcatcaaatgcgcttttggcaaaacgcggcaacagcagtttgttggcgtagccattgaccttgcgcagccactcttcaatggcaggggaacgtttgccggtcagtaacggtttgccgtcgagtttatcgacatagtgaacgatgtccatgctttctggcatatagcggctgtcatctttttgcagaatgggaacctgtttttgaccgaccatccgggtgggtgtttctgcgtcgtcgttgagcagaacatgtaattcgacggggatatttttcaggccgaaaatcatgcgggctttgaggcagtaagggcagtgatcgtaaatgtatagcttcacgtgactcctccatttggctgtcagttcactttcagtatgaaggagtcaggggggagtatcaaatcaggcgtcgcgttcaagcaaacgacgcgcggcgcgtttctggctaaactgccaacccagcgcaaggaaagtgaagatgccaataatgcccagcatcatccacggaagctctggctggtgcgcgcttttgcccaggtcaaacagccagccgccaccgatataaccaatagcgccgccaatcgccagacccagacggctaaaccccatatagctgccgcgagctcttgcgtccgccaggctagcacttaaggtttcacgcgcaggctcggcaatgatgctcccgatataaaacagacaaatcagggtgaaaagttgttgcaggccgctgaccatgcccaccggcatcatgcttaaactcattatcaacagcccagccatcaaccggtgttccagacgaaaatgcttttcactccagcgggcgatagggtagagcaacgttaagctcagacacgcttcaatggcatacatccatttaacggcagagggcgcgcagccacgtcgttgaccataattggcagcatcagcatcacttgtacagccagcatgtagtaacccgccagcgtcagaacataggtgacaaaacgcttgtcacgcatcacgcgggtcatgccttcgcgaacgggcgtgcgtacggtggagagtttccatgctggtaacaaccacgcattgaacgccgcacatagcacaaatagaactgcccctgtggcgcagaccaggcgaaagtcgtattgcaacagccagctccccaacaatgcgccaatgaccgcaccggcactgtcctgcatcatcaacaggctgaaaaaacgaccacgctgctgtggacggattaatttcaccaccagcgcgctacgcggcggatcaaacaacgtgccaccgagtccgctgagcaggcaactaaaccacaatagccacggttcgtgggcgatacccattgtggcgaatccggcggcgcgcatcagcataccggtaacaatcatcggtttggcaccaaagcggtcggcaattgcaccgccgaaaatacccagaccttgctgaataaattggcgtagaccgagagcaataccgaccatgacggcggcccagcccatttgatcaacgaagcggatagagatcagcgggaagacaacaaagaaccccagcacgaccagcatattatcgatgagcaggaaatatttacccaggttcctcgcctggctcacgcgggacatttcccctcccgggaaataaaagatgagcactttctattctgcattgccgctaagacttttcccatcacttcggggacaatatttttttatcaaaacgtcgctttgatagagagtttttatcaaatatgtgaataatgcagaaaatggcattttggacttttcacagggtctggttgcgcaggtatagtaatacttacagcgtattaaagacgttacgggaaggagtaggtatagaatgtttggctatcgcagtaacgtgccaaaagtgcgcttaaccacagaccgactggtcgtgcgtctggtgcatgatcgtgatgcctggcgtcttgcggattattacgcagagaatcgccatttcctcaagccctgggagccagtgcgcgacgaaagccactgttatccaagtggctggcaggccaggctggggatgattaacgaatttcataaacaaggtagtgctttctactttggcttattcgacccggacgaaaaagagattattggcgttgccaatttttccaatgttgttcgtggctcttttcatgcctgctatctcggttatagcattgggcaaaaatggcagggcaaaggactcatgtttgaagccctgaccgcagccattcgttatatgcagcgcacccaacatattcatcgcattatggctaattatatgccgcacaataaacgcagcggtgatttactggcgcgactgggttttgaaaaagaaggctatgcgaaagactatctgttgattgatggacaatggcgcgatcacgtactgacggcattaactaccccagactggacgcccggccgctaaggagaatctcatgaaatatcaacttactgcccttgaagctcgcgtgattggttgcttgctggaaaagcaggtgaccacgccggagcaatacccgctcagtgtcaatggtgtagtcacggcctgtaatcagaaaacgaaccgtgaaccggtcatgaatctgagtgaatccgaagtgcaggaacagctggataatctggtcaaacgtcattatctacgcacagtgagcggttttggtaatcgggtcaccaaatatgagcaacgtttttgtaatagtgaatttggcgatctgaaactgagcgcagcggaagtggcgttaatcaccacgttgttattgcgtggtgcccagacgccaggtgaactgcgcagccgcgccgcgcgaatgtatgaattcagcgatatggcggaagtggagagcacgctggaacaactggcaaatcgcgaagatggtccttttgtggtgcgtctggcccgcgaaccgggtaaacgcgaaaaccgctacatgcatcttttcagtggtgaggttgaagatcagccggcggtgacggatatgagcaacgcggttgacggtgatttacaggcccgcgtcgaagccctggaaatcgaagtggcagaactgaaacagcgtcttgatagcttgctggcccatctgggagattaaagtgaaaaaattacgtatcggcgtagtgggattaggtggcattgcgcaaaaagcgtggttaccggtgctggcggcagcgtctgactggacgttacaaggagcctggagccctacgcgcgcgaaagccctgccaatttgtgaaagctggcgcattccttatgccgatagcttatccagccttgccgccagttgcgatgcggtttttgtgcattccagcaccgccagccactttgacgtggtcagtacgttactcaatgcgggggtacatgtctgtgtcgataaaccgctggcagaaaatctgcgcgatgctgaacggctggtggaactggcggcgcggaaaaaactgacgttgatggtcggttttaaccgtcgtttcgcaccactctacggtgagttaaaaacgcaactcgccaccgcagccagcctaagaatggataaacatcgtagcaatagcgtcgggccacacgatctttatttcacgttgctggatgattatctgcatgtggtggataccgcgctgtggttgagcggcggcaaagcctctctggatggcggtacgctactgactaacgacgctggcgaaatgctgtttgccgagcaccattttagcgctggtcctttgcagatcaccacctgtatgcatcgccgtgccggaagtcagcgtgaaaccgtgcaggccgtgactgacggtgcgctcatcgacattacggatatgcgcgaatggcgtgaggagcgcgggcagggcgtagtgcataaaccgattcctggttggcagagtacgcttgagcaacgtgggtttgtcggctgtgcgcggcacttcattgaatgtgtgcaaaaccagacagttccgcaaaccgccggcgaacaggccgtgctggcgcaacgtatcgttgacaagatctggcgcgatgcgatgagtgaataaaccctgtaacatctggcggtagcaattcaccataatccaggtagactattcgcctctttcagcgcctgccttgcaggcgttttgcccgtgggtctggattagaacaccgatgaatttattaaaaagcctggccgccgtcagcagcatgaccatgtttagccgtgtgcttggcttcgcacgagacgcaattgtcgccagaatctttggcgcagggatggcaaccgacgcctttttcgtcgcttttaaacttcctaacttgttacgccgtatctttgccgaaggggcattttcccaggcatttgtaccgattctggcggaatataaaagtaagcagggtgaagacgccacgcgggtctttgtctcttatgtttctggcctgctgacacttgcgctggcggttgtgacggtcgctggcatgctcgccgcaccgtgggtgatcatggtgaccgcgccaggcttcgctgacacagctgacaaatttgccctgaccagccagctactaaagattacctttccctatatcttgctgatctccctggcgagcctggtgggagcgattctgaatacgtggaaccgcttcagcattccggcgtttgctccaacactgcttaacatcagcatgattggtttcgcgctgtttgccgcaccgtactttaacccaccggtgctggcgctggcgtgggctgttacggtcggcggcgtcctgcagctggtgtatcagctaccgcacctgaagaagatcggcatgctggtcctgccgcgcattaacttccacgatgccggagcaatgcgcgtggtgaaacagatgggaccggcgatccttggcgtctctgtgagccagatctccttaatcatcaacaccatttttgccagctttcttgcttccggtagcgtgtcttggatgtattacgccgaccgcttaatggagtttccgtccggtgtgctgggcgtggcgcttggcaccattttgctgccgagcctgagcaaaagttttgccagtggcaatcatgatgaatacaaccgtttgatggactgggggttgcgtctttgtttcctgttggcgctgccgagtgcggttgcgttgggcattctttccggtccgttgaccgttagcctgttccagtacggtaaatttaccgcgtttgatgcgctgatgacccagcgggcgttaattgcctacagcgtgggtttgattggcctgattgtagtgaaagtgttggctcctggcttttattcccgccaggacattaaaacgccagtgaaaattgccatcgttacgctgattttaacgcaattgatgaacctggcgtttattggtccgttgaaacatgccgggctgagtctttctattggtctggcggcgtgtctgaatgctagcctgctttactggcagttgcgtaagcagaaaatctttaccccgcaacccggctggatggcgtttctgttgcgtctggtggtggcggtactggtgatgtctggcgtgcttttaggtatgttacatatcatgccggagtggagtttgggtaccatgccctggcgtttactgcgtttaatggcggtcgtgctggcggggattgccgcgtacttcgctgcactggcggtactgggcttcaaagttaaagaatttgcccgccggacggtgtaacaatgcattccggcctgcagtgttcgctttaaaacatatcatgaaactgggtatgttttgtctgcctgctctgggatcgctggggcgggcatttttttgcctattttgcattgttggttagcaaggatgccattcgatgaattttaatatgttgattcaaagatgaaataaaaaagccctgcagttaccagggcttgattactttgagctaattattactcaacaggttgcggacgcgcaggagcggcagaggcatgatgtgttgccgtatgaccacctgcggcacctttaccttcgaaggcaaaagtagggcgctgccagtcactgtgacgcggtgcctccggaacatattccggtgctggagcgcgcgtcattggcgcggtagcgtggttatgctcaacggtgacctcaggttcgaccgcagctaccgtttcaacttctgctgcgacttcagcgactactggcgcggcaggttgagcaacaacttcaggttcagcaactacaacctcagcagtttcgacaacttcttcaatatctgccgtctcttcctgcggttcaaccaccggttctgcttgttctgcaacttcctgggctacggcaacatcagactcggtaatcacctgcggctgttcagttaccgcggcagcgatcacttcaggatgcgtcgtttcaaccacttccggttgcggttcggcaacctgaacgggggcttctacgacaccggccacttcttcaacaactggcgcgctaacaaccggttcgatagcggcggcgacagggacctcagtcaccatcggctgcacatgtacttcttcctgttcgcgctgctcttcaacctgtacatcttgcggacgtacaattggatagcggatccagactttgccagaggccagttccggagacgcgcacgctacggtcaacggcattgggctctgggttggataacgctcgtcacgatagcgacgacgacgctgaccacttacgcgcaggtgacgagggctgcggcgagaacgacgcggcatgccaccgttgtcacggttatcagcattgttctcttcttgctgttctggtgcagtttgcgctacgactggcagcgggactttcaccagttctgtgcgtggagctggcgcttcctgaacaattggttcggcagcgacagtttcttcaaccaccggtgcgactaccgcttcttcggctacgctttgctcgtaacgcactttctgattgagctgacgctgtttacgacgcggctgaaccggacgtacacgttcttcctgttcggtttcctgaacagattgctcttcaacattcagcgccttcgcttcttgttgcgcctgacgtttatcatcattacggcggcggctacgttcacgacgcggcgcttgctgctcgtcggcggtacgcgctttttccgttacctcagcctgctgacggctctcacgcgtctcggcagtctgctgctgtgcctggcgacgattacgacggttttcttcgcgattatcgctgccttcagtacgttcactacgggtgtcgcggcgctcattacggtcacggcggttgttctgacgaggcttgcgacgatcctgttgacgttccggtttcgcttctgctttcggtgctggttgctcggtcggtttggtttcttcaccaccgctgaacagcgctttcagtgcgccgaagaagcggctcaacagcccaggttgtgcaggagctgctggtgttgccggtgcagctttcggtgctggagctacaacaggcgcggcaggttcagctggcgttggcgcaggcggcacatccggcatggcaaaggttgccagcgcaggttgttccggacgcttacgttcagcgaactcttcttcagacggcagcgccatcgcttcttcatgcagcttcggcagcatgtagcttaaggttggggtttcttcccctttacgcacgcgcagcacgtggtagtgcggggtttccatctgatcgtttggcacaattacacagcgcacaccgtcctgacgagtttcaatggcatttaccgcagaacgtttttcattcagcaggtaagaagcgattggcacaggaacaatggcgtgaacttcctgggtgttctctttcagcgcttcttcttcgatcagacgcagaatagagaggctcaggctttcgttgtcacgcacggtgccagtaccagaacaacgcggacaaacgtgatgactggattcacccagacttgggctcaggcgctgacgggacatttccagcaggccaaagcgagaaatatggctgatttgaatacgcgcacggtcctgacgcaccgcttcacgcagacggttttctaccgcacgctggtggcgtactggcgtcatgtcgatgaagtcgataacaatcaggccgccgaggtcacgcaggcgcagctgacgagcaatctcatcggcagcttcgaggttagtgttaaacgcggtttcttcgatatcgccgccgcgggtcgcgcgtgcggagttgatgtcgatggccgttaacgcttcggtgctgtcgataacaatggaaccaccagacggcagacgaacttcacgctggaaggcggactcgatctgactctcgatctggtagtggctgaacagcgggatctcgccggtgtacagtttgattttgctgctgaaatccgggcgacctaatgcagcgatatgctgacgtgccagttcgagcactttcgggttatcgataaggatttcgccgatgtcctgacgtaagtaatcgcggaatgcgcgaacgattacgttgctctcctgatgaatcaggaacggggccgggcggctttcagcggcttttttgatggcttcccagtgtttcagacggaagcttaaatcccattgcagcgcctcagcagatttgccgacgccagcggtgcgcacgataagccccatgccttccggcagttcaaggcttgccagtgcttcttttaattcggtacggtcgtcgccttcgatacggcgagaaatgccacccgcgcgcgggttgttcggcatcagaaccagatagctacccgccagactgataaaggtggttaatgccgcgcctttgttgccgcgctcttctttatcgatctgaacaatgacttcctgaccttcacgcaacacatctttaatgttgggacgaccatgagcactgtagttagcagggaaatattcgcgggcaatttcttttagtgggaggaaaccgtgacgttcagcgccgtaatcaacaaaagcagcttccagactcggttcaatgcgggtgattttacctttgtagatgtttgcctttttctgctcgtgccctggactttcgatatccaggtcatacagacgctgcccatctacaagggcaacgcgcaactcttcctgctgagttgcgttgattaacattcttttcatcgtaacttactcattattcttacattgacgactaagctgcgggcaaagtaacgcctttccgggtgtgaaccgatggcctcgtgtctagtcgcgtcgccaacctcacggttatcgtcagctcaaagaggcgcagagtgtgagttgcccgtttttcatgcggaaaaacagcgcaattatcaaagaaacagactgggtattactctccagaaatatttccatctaccggtaaggactgcaacccgcagcccgctaactgcctgaaagatcaatacgtcttacgccattgctgcgtggatgatcggtcgggcaaaatgggttattccgtaaaatttcttgttttaacaaggatggacacggaaacggcctcattattccactgcaagccttgttatagcaagatgacttttaccatttatcacccgcttactcacagttttttcacttcttgctggtgattggtttaataaccatcaataaagtgatcacgcagtgaagtaataaggtgcaaaagtaaatataagcatagaaaaatgagtggcgcgaatcctgttggctaattagaatcgccaaccatgaaaacagagactccatccgtaaaaattgttgctatcaccgctgacgaagcggggcaacgtatcgataactttttgcgtacccaattgaaaggcgtaccaaaaagtatgatttaccgtattttgcgtaaaggcgaagtgcgggtgaacaaaaaacgtattaagcctgaatataaactcgaagcgggtgatgaggtgcgtattccaccggttcgcgttgctgagcgggaagaagaggcggttagcccacatctgcaaaaggtggcggcgctggcggacgtcatcttatatgaagatgatcacatcctggtgctgaataaaccttccggtacggcggtacatggcggcagtggtttaagcttcggcgttattgaaggtttgcgggcgttgcgcccggaagcgcggttccttgaactggttcatcgtcttgaccgggacaccagtggtgttttgctggtagcgaaaaaacgcagcgcgttgcgttctctgcatgagcaattacgtgaaaaagggatgcaaaaagattacctggcgctggtgcgcggtcagtggcagagccatgtgaagagcgttcaagcaccgttactgaaaaatattctgcaaagcggcgaacgtatcgtgcgtgtgagtcaggaaggcaaaccgagcgaaacacgctttaaagtggaagaacgctatgcatttgccaccctggtgcgttgtagcccggtaacagggcgtactcaccagatccgtgtgcatacacaatatgcgggtcatccgattgcctttgacgatcgctacggtgaccgtgaatttgacaggcagctcactgaagcaggcacgggattaaatcgcctgttcctgcacgctgcagcgttgaagtttactcatccggggaccggtgaggtgatgcgtatcgaagctccgatggatgaaggtttgaagcgttgtttgcaaaagctgcgtaacgcgcgctaatacaagcatataaacctgataatgggcggttggcctgataaggcgtttacgccgcatcaggccgccagcaccgattgccggatgcgacgtaaccacatccggcgcaaaaaattatcccatcagcgggtttttcccttcccgacgtaacatctgacacagcgcgattagcggtaaaccaaccagcgtgttaggatcacgcccctctaaacgctcaaacagcgtaatgccaaatccttcactcttaaagctacccgcgcagtgcaggggatgctctttacgcacgtaattatcaatctccgcctcgctcaggtgacggaaatggacgtcaaaaggctccacttctgtttgcagatgcccattcgcgctattaaacaacgccagtccagtatagaaggtgacgatattgccgctggctttgcgtaattgcagacgggcattttcttccgttaacggtttaccggtgatttcgccatcaagaacacatacctggtcactaccaataattaaatgatccggataacgactcgccagagattgcgctttttcttgtgccagtcgaagcaccaactgtcgcggactttcgtcgctgcgtggggtttcgtcgacctctggtgctgcacattcaaaagagatttgcagtttttccagaagagcgcgacgccatgggctggtggaggctaaaataagtttaggcatatttttttccatcagatatagcgtattgatgatagccattttaaactatgcgcttcgttttgcaggttgatgtttgttatcagcactgaacgaaaataaagcagtaacccgcaatgtgtgcgaattattggcaaaaggcaaccacaggctgcctttttctttgactctatgacgttacaaagttaatatgcgcgccctatgcaaaaggtaaaattacccctgactctcgatccggttcgtacggctcaaaaacgccttgattaccagggtatctatacccctgatcaggttgagcgcgtcgccgaatccgtagtcagtgtggacagtgatgtggaatgctccatgagcttcgctatcgataaccaacgtctcgcagtgttaaacggcgatgcgaaggtgacggtaacgctcgagtgtcagcgttgcgggaagccgtttactcatcaggtctacacaacgtattgttttagtcctgtgcgtagtgacgaacaggctgaagcactgccggaagcgtatgaaccgattgaggttaacgaattcggtgaaatcgatctgcttgcaatggttgaagatgaaatcatcctcgccttgccggtagttccggtgcatgattctgaacactgtgaagtgtccgaagcggacatggtctttggtgaactgcctgaagaagcgcaaaagccaaacccatttgccgtattagccagcttaaagcgtaagtaattggtgctccccgttggatcggggataaaccgtaattgaggagtaaggtccatggccgtacaacagaataaaccaacccgttccaaacgtggcatgcgtcgttcccatgacgcgctgaccgcagtcaccagcctgtctgtagacaaaacttctggtgaaaaacacctgcgtcaccacatcactgccgacggttactaccgcggccgcaaggtcatcgctaagtaatcacgcatctgcgtgatgaagcttagtgaggattttccccaggcaactggggaaagaccaaaccgggcggcgacgataccttgacacgtctaaccctggcgttagatgtcatgggaggggattttggcccttccgtgacagtgcctgcagcattgcaggcactgaattctaatagccaactcactcttcttttagtcggcaattccgacgccatcacgccattacttgctaaagctgactttgaacaacgtagccgtctgcagattattcctgcgcagagtgttatcgccagtgatgcccggcctagccaagctatccgcgccagtcgtgggagtagtatgcgcgtggccctggagctggtgaaagaaggtcgagcgcaagcctgtgtcagtgccggtaataccggggcgctgatggggctggcaaaattattactcaagcccctggaggggattgagcgtccggcgctggtgacggtattaccacatcagcaaaagggcaaaacggtggtccttgacttaggggccaacgtcgattgtgacagcacaatgctggtgcaatttgccattatgggcagtgttctggctgaagaggtggtggaaattcccaatcctcgcgtggcgttgctcaatattggtgaagaagaagtaaagggtctcgacagtattcgggatgccagtgcggtgcttaaaacaatcccttctatcaattatatcggctatcttgaagccaatgagttgttaactggcaagacagatgtgctggtttgtgacggctttacaggaaatgtcacattaaagacgatggaaggtgttgtcaggatgttcctttctctgctgaaatctcagggtgaagggaaaaaacggagctggtggctactgttattaaagcgttggctacaaaagagcctgacgaggcgattcagtcacctcaaccccgaccagtataacggcgcctgtctgttaggattgcgcggcacggtgataaaaagtcatggtgcagccaatcagcgagcttttgcggtcgcgattgaacaggcagtgcaggcggtgcagcgacaagttcctcagcgaattgccgctcgcctggaatctgtatacccagctggttttgagctgctggacggtggcaaaagcggaactctgcggtaacaggacgctgccagcgaactcgcagtttgcaagtgacggtatataaccgaaaagtgactgagcgtacatgtatacgaagattattggtactggcagctatctgcccgaacaagtgcggacaaacgccgatttggaaaaaatggtggacacctctgacgagtggattgtcactcgtaccggtatccgcgaacgccacattgccgcgccaaacgaaaccgttagtaccatgggctttgaagcggcgacacgcgcaattgagatggcgggcattgagaaagaccagattggcctgatcgttgtggcaacgacttctgctacgcacgctttcccgagcgcagcttgtcagattcaaagcatgttgggcattaaaggttgcccggcatttgacgttgcagcagcctgcgcaggtttcacctatgcattaagcgtagccgatcaatacgtgaaatctggggcggtgaagtatgctctggtcgtcggttccgatgtactggcgcgcacctgcgatccaaccgatcgtgggactattattatttttggcgatggcgcgggcgctgcggtgctggctgcctctgaagagccgggaatcatttccacccatctgcatgccgacggtagttatggtgaattgctgacgctgccaaacgccgaccgcgtgaatccagagaatagtattcatctgacgatggcgggcaacgaagtcttcaaggttgcggtaacggaactggcgcacatcgttgatgagacgctggcggcgaataatcttgaccgttctcaactggactggctggttccgcatcaggctaacctgcgtattatcagtgcaacggcgaaaaaactcggtatgtctatggataatgtcgtggtgacgctggatcgccacggtaatacctctgcggcctctgtcccgtgcgcgctggatgaagctgtacgcgacgggcgcattaagccggggcagttggttctgcttgaagcctttggcggtggattcacctggggctccgcgctggttcgtttctaagataaggattaaaacatgacgcaatttgcatttgtgttccctggacagggttctcaaaccgttggaatgctggctgatatggcggcgagctatccaattgtcgaagaaacgtttgctgaagcttctgcggcgctgggctacgacctgtgggcgctgacccagcaggggccagctgaagaactgaataaaacctggcaaactcagcctgcgctgttgactgcatctgttgcgctgtatcgcgtatggcagcagcagggcggtaaagcaccggcaatgatggccggtcacagcctgggggaatactccgcgctggtttgcgctggtgtgattgatttcgctgatgcggtgcgtctggttgagatgcgcggcaagttcatgcaagaagccgtaccggaaggcacgggcgctatggcggcaatcatcggtctggatgatgcgtctattgcgaaagcgtgtgaagaagctgcagaaggtcaggtcgtttctccggtaaactttaactctccgggacaggtggttattgccggtcataaagaagcggttgagcgtgctggcgctgcctgtaaagcggcgggcgcaaaacgcgcgctgccgttaccagtgagcgtaccgtctcactgtgcgctgatgaaaccagcagccgacaaactggcagtagaattagcgaaaatcacctttaacgcaccaacagttcctgttgtgaataacgttgatgtgaaatgcgaaaccaatggtgatgccatccgtgacgcactggtacgtcagttgtataacccggttcagtggacgaagtctgttgagtacatggcagcgcaaggcgtagaacatctctatgaagtcggcccgggcaaagtgcttactggcctgacgaaacgcattgtcgacaccctgaccgccagcgcgctgaacgaacctagtgcgatggcagcggcgctcgagctttaaaagaggaaaatcatgaattttgaaggaaaaatcgcactggtaaccggtgcaagccgcggaattggccgcgcaattgctgaaacgctcgcagcccgtggcgcgaaagttattggcactgcgaccagtgaaaatggcgctcaggcgatcagtgattatttaggtgccaacggcaaaggtctgatgttgaatgtgaccgacccggcatctatcgaatctgttctggaaaaaattcgcgcagaatttggtgaagtggatatcctggtcaataatgccggtatcactcgtgataacctgttaatgcgaatgaaagatgaagagtggaacgatattatcgaaaccaaccttagttctgttttccgtctgagtaaagcggtaatgcgcgctatgatgaaaaagcgtcatggtcgtattatcactatcggttctgtggttggtaccatgggaaatggcggtcaggccaactacgctgcggcgaaagcgggcttgatcggcttcagtaaaagtctggcgcgcgaagttgcgagtcgcggtattactgtaaacgttgttgctccgggctttattgaaacggacatgacacgtgcgctgagcgatgaccagcgtgcgggtatcctggcgcaggttcctgcgggtcgcctcggcggcgcacaggaaatcgccaacgcggttgcattcctggcatccgacgaagcagcttacatcacgggtgaaactttgcatgtgaacggcgggatgtacatggtctgaccgcgatttgcacaaaatgctcatgttgcgcgcagtctgcgtggttatgagtaataattagtgcaaaatgatttgcgttattggggggtaaggcctcaaaataacgtaaaatcgtggtaagacctgccgggatttagttgcaaatttttcaacattttatacactacgaaaaccatcgcgaaagcgagttttgataggaaatttaagagtatgagcactatcgaagaacgcgttaagaaaattatcggcgaacagctgggcgttaagcaggaagaagttaccaacaatgcttctttcgttgaagacctgggcgcggattctcttgacaccgttgagctggtaatggctctggaagaagagtttgatactgagattccggacgaagaagctgagaaaatcaccaccgttcaggctgccattgattacatcaacggccaccaggcgtaagtgaacatctccaggcggtcgttcgaccgcctgagttttatctttttgtcccactagaatcattttttccctccctggaggacaaacgtgtctaagcgtcgtgtagttgtgaccggactgggcatgttgtctcctgtcggcaataccgtagagtctacctggaaagctctgcttgccggtcagagtggcatcagcctaatcgaccatttcgatactagcgcctatgcaacgaaatttgctggcttagtaaaggattttaactgtgaggacattatcagccgcaaagaacagcgcaagatggatgccttcattcaatatggaattgtcgctggcgttcaggccatgcaggattctggccttgaaataacggaagagaacgcaacccgcattggtgccgcaattggctccgggattggcggcctcggactgatcgaagaaaaccacacatctctgatgaacggtggtccacgtaagatcagtccattcttcgttccgagtacgattgtgaacatggtggcaggtcatctgactatcatgtatggcctgcgtggcccgagcatctctatcgcgactgcctgtacttccggcgtgcacaacattggccatgctgcgcgtattatcgcgtatggcgatgctgacgtgatggttgcaggtggcgcagagaaagccagtacgccgctgggcgttggtggttttggcgcggcacgtgcattatctacccgcaatgataacccgcaagcggcgagccgcccgtgggataaagagcgtgatggtttcgtactgggcgatggtgccggtatgctggtacttgaagagtacgaacacgcgaaaaaacgcggtgcgaaaatttacgctgaactcgtcggctttggtatgagcagcgatgcttatcatatgacgagtccgccagaaaatggcgcaggcgcagctctggcgatggcaaatgctctgcgtgatgcaggcattgaagcgagtcagattggctacgttaacgcgcacggtacttctacgccggctggcgataaagctgaagcgcaggcggtgaaaaccatcttcggtgaagctgcaagccgtgtgttggtaagctccacgaaatctatgaccggtcacctgttaggtgcggcgggtgcagtagaatctatctactccatcctggcgctgcgcgatcaggctgttccgccaaccatcaacctggataacccggatgaaggttgcgatctggatttcgtaccgcacgaagcgcgtcaggttagcggaatggaatacactctgtgtaactccttcggcttcggtggcactaatggttctttgatctttaaaaagatctaagttgtcattttccacccttataaaaggtccgcttgcgggccttttttcttagcttttattccgacttgttccgtagtgaacatgctgccacactaacaattctctgataaggagccggtatgttcttaattaacggtcataagcaggaaagcctggcagtaagcgatcgggcaacgcagtttggtgatggttgttttaccaccgccagagttatcgacggtaaagtcagtttgttaagcgcgcatatccagcgactacaggatgcttgtcagcggttgatgatttcctgtgacttctggcctcagcttgaacaagagatgaaaacgctggcagcagaacagcaaaatggtgtgctgaaagtcgtgatcagtcgcggtagtggcgggcgagggtacagcacattgaacagcggaccggcaacgcggattctctccgttacggcttatcctgcacattacgaccgtttgcgtaacgaggggattacgttggcgctaagcccggtgcggctggggcgcaatcctcatcttgcaggtattaaacatctcaatcgtcttgagcaagtattgattcgctctcatcttgagcagacaaacgctgatgaggcgctggtccttgacagcgaagggtgggttacggaatgctgtgcggctaatttgttctggcggaagggcaacgtagtttatacgccgcgactggatcaggcaggtgttaacggcattatgcgacaattctgtatccgtttgctggcacaatcctcttatcagcttgtcgaagtgcaagcctctctggaagagagcttgcaggcagatgagatggttatttgtaatgcgttaatgccagtgatgcccgtatgtgcctgtggcgatgtctcctttagcagtgcaacgttatatgaatatttagccccactttgtgagcgcccgaattaatcatgaaaaaagtgttattgataatcttgttattgctggtggtactgggtatcgccgctggtgtgggcgtctggaaggttcgccatcttgccgacagcaaattgcttatcaaagaagagacgatatttaccctgaagccagggaccggacgtctggcgctcggtgaacagctttatgccgataagatcatcaatcgtccacgggtttttcaatggctgctgcgtatcgaaccggatctttctcactttaaagccgggacttaccgctttacaccgcagatgaccgtgcgcgagatgctgaaattgctggaaagcggtaaagaagcacagttccctctgcgactggtagaagggatgcgtctgagcgattacctcaagcaattgcgtgaggccccgtatatcaagcatacgctgagcgatgataagtacgccaccgtagcgcaggcacttgaactggaaaacccggagtggattgaaggttggttctggccagacacctggatgtataccgccaataccaccgatgtcgcgttactcaagcgagcgcacaagaaaatggtgaaagcggtcgatagcgcctgggaagggcgtgcggacggtctgccttataaagataaaaaccagttggtgacgatggcaagtattatcgaaaaagaaaccgccgttgccagtgaacgcgataaggttgccagtgtatttatcaaccgtttacgcattggtatgcgcctgcagaccgacccgaccgtgatttacgggatgggagagcgttataatggcaaactttctcgtgcagacctggaaacgccgacagcgtataacacctataccattaccggtctgccgccaggtgcgatagcgacgccgggggcggatagcctgaaggctgctgcgcatccggcaaaaacgccgtatctctattttgtggccgatggtaaaggtggtcacacgtttaataccaatcttgccagtcataacaagtctgtgcaggattatctgaaagtgcttaaggaaaaaaatgcgcagtaagtatatcgtcattgaggggctggaaggcgcaggcaaaactaccgcgcgtaatgtggtggttgagacgctcgagcaactgggtatccgcgacatggttttcactcgggaacctggcggtacgcaacttgccgaaaagttaagaagcctggtgctggatatcaaaagcgtaggcgatgaagtcattaccgataaagccgaagttctgatgttttatgccgcgcgcgttcaactggtagaaacggtcatcaaaccagctctggctaacggcacctgggtgattggcgatcgccacgatctctccactcaggcgtatcagggcggcggacgtggtattgaccaacatatgctggcaacactgcgtgatgctgttctcggggattttcgccccgacttaacgctctatctcgatgttaccccggaagttggcttaaaacgcgcgcgtgcgcgcggcgagctggatcgtattgagcaagaatctttcgatttctttaatcgcacccgcgcccgctatctggaactggcagcacaagataaaagcattcataccattgatgccacccagccgctggaggccgtgatggatgcaatccgcactaccgtgacccactgggtgaaggagttggacgcatgagatggtatccatggttacgacctgatttcgaaaaactggtagccagctatcaggccggaagaggtcaccatgcgctactcattcaggcgttaccgggcatgggcgatgatgctttaatctacgccctgagccgttatttactctgccaacaaccgcagggccacaaaagttgcggtcactgtcgtggatgtcagttgatgcaggctggcacgcatcccgattactacaccctggctcccgaaaaaggaaaaaatacgctgggcgttgatgcggtacgtgaggtcaccgaaaagctgaatgagcacgcacgcttaggtggtgcgaaagtcgtttgggtaaccgatgctgccttactaaccgacgccgcggctaacgcattgctgaaaacgcttgaagagccaccagcagaaacttggtttttcctggctacccgcgagcctgaacgtttactggcaacattacgtagtcgttgtcggttacattaccttgcgccgccgccggaacagtacgccgtgacctggcttagtcgcgaagtgacaatgagtcaggatgcattacttgccgcattgcgcttaagcgccggtagccctggcgcggcactggcgttgtttcagggagataactggcaggctcgtgaaacattgtgtcaggcgttggcatatagcgtgccaagcggcgactggtatagcctgctagcggcccttaatcatgaacaagctccggcgcgtttacactggctggcaacgttgctgatggatgcgctaaaacgccatcatggtgctgcgcaggtgaccaatgttgatgtgccgggcctggtcgccgaactggcaaaccatctttctcccagccgcctgcaggctatactgggggatgtttgccacattcgtgaacagttaatgtctgttacaggcatcaaccgcgagcttctcatcaccgatcttttactgcgtattgagcattacctgcaaccgggcgttgtgctaccggttcctcatctttaagagagacatcatgtttttagtcgacagtcactgccatctcgatggtctggattatgaatctttgcataaggacgtggatgacgttctggcgaaagccgccgcacgcgatgtgaaattttgtctggcagtcgccacaacattaccgggttatttacatatgcgggatctggtaggcgaacgtgacaacgtcgtattttcttgtggcgtgcatccactcaaccagaatgatccctacgatgtagaagatttacgccgtctggcggcagaagagggtgttgtagcgctgggtgaaaccgggctggattattattacacgccggaaactaaagtacgtcagcaagagtccttcatccatcatatccagattggtcgtgaactgaacaagccggttatcgtccatacccgtgacgcccgtgccgatacgctggcaattctgcgcgaagaaaaagtgacggattgcggtggcgtactacactgttttacagaggacagagaaacggcgggtaaattactggatctcggattttacatctccttttccggcattgtgaccttccgtaatgcggagcaactgcgcgatgctgcgcgttatgtccccctggatcggttactggtggaaactgacagtccttaccttgcgccggtaccgcatcgaggaaaagagaatcaacctgcgatggttcgtgacgttgcagaatacatggctgtgttgaaaggtgttgccgttgaagaactggcgcaggtaaccaccgataacttcgcccgtctgtttcacatcgacgcttcccgccttcaatccatccgttgaatgagtttttttaaagctcgtaattaatggctaaaacgagtaaagttcaccgccgaaaattgggcggtgaataaccacgtttgaaatattgtgacatatgttttgtcaaaatgtgcaacttctccaatgatctgaagttgaaacgtgatagccgtcaaacaaattggcactgaattattttactctgtgtaataaataaagggcgcttagatgccctgtacacggcgaggctctccccccttgccacgcgtgagaacgtaaaaaaagcacccatactcaggagcactctcaattatgtttaagaatgcatttgctaacctgcaaaaggtcggtaaaagcctgatgctgccggtatccgtactgcctatcgcaggtattctgctgggcgtcggttccgcgaatttcagctggctgcccgccgttgtaagccatgttatggcagaagcaggcggttccgtctttgcaaacatgccactgatttttgcgatcggtgtcgccctcggctttaccaataacgatggcgtatccgcgctggccgcagttgttgcctatggcatcatggttaaaaccatggccgtggttgcgccactggtactgcatttacctgctgaagaaatcgcctctaaacacctggcggatactggcgtactcggagggattatctccggtgcgatcgcagcgtacatgtttaaccgtttctaccgtattaagctgcctgagtatcttggcttctttgccggtaaacgctttgtgccgatcatttctggcctggctgccatctttactggcgttgtgctgtccttcatttggccgccgattggttctgcaatccagaccttctctcagtgggctgcttaccagaacccggtagttgcgtttggcatttacggtttcatcgaacgttgcctggtaccgtttggtctgcaccacatctggaacgtacctttccagatgcagattggtgaatacaccaacgcagcaggtcaggttttccacggcgacattccgcgttatatggcgggtgacccgactgcgggtaaactgtctggtggcttcctgttcaaaatgtacggtctgccagctgccgcaattgctatctggcactctgctaaaccagaaaaccgcgcgaaagtgggcggtattatgatctccgcggcgctgaccagcttcctgaccggtatcaccgagccgatcgagttctccttcatgttcgttgcgccgatcctgtacatcatccacgcgattctggcaggcctggcattcccaatctgtattcttctggggatgcgtgacggtacgagcttcagccacggtctgatcgacttcatcgttctgtctggtaacagcagcaaactgtggctgttcccgatcgtcggtatcggttatgcgattgtttactacaccatcttccgcgtgctgattaaagcactggatctgaaaacgccgggtcgtgaagacgcgactgaagatgcaaaagcgacaggtaccagcgaaatggcaccggctctggttgctgcatttggtggtaaagaaaacattactaacctcgacgcatgtattacccgtctgcgcgtcagcgttgctgatgtgtctaaagtggatcaggccggcctgaagaaactgggcgcagcgggcgtagtggttgctggttctggtgttcaggcgattttcggtactaaatccgataacctgaaaaccgagatggatgagtacatccgtaaccactaatccgtaagacgttggggagactaaggcagccagatggctgccttttttacaggtgttattcagaattgatacgtgccggtaatgctgaaattacgcggtgtgccgtagacgatagaaccttccacgttggtatcgtaggttttgtcgaacaggttattgacgttcccctgtaagctgaagtttttcgtcacctggtagcgggtgaagagatccaccagcgcgtagctaccttgctcggcgcggaaggtgccatacggcgtcacggtgtcggtatacacgcgattttgccagttaacaccaccgccgaccgtcaactctggcatgacaggcaaccgatagctggtgaacattttaaccgtggtgcgtggcagattaggattaacggcgtttccttcgttatcctctgcaatatagcgcgttgcgccaaatgtcagctgccagttgtcggtaattgcgccgttgagttcaaattccacccctttactgactgtcccatccaccgctttataggcggtttcgccgttgctgccggggataggtgtaccggtggactgagcgacattatcctgctcaatacggaagatggctaacgtggtggtcagacggctattcatccagtcgcttttcagacccagctcgtagttgttaccggtgattggagccagatatttgccactactgtcacgatcattttgcggctggaaaatagaggtatagctggcgtaggtgctccagttgtcattgatgtcaaacaccagaccagcgtaaggcgtggtgtggtttttctccatgctgtaagtcagcgtatcaacccgccagttggtataacgtgcgccgaggatcagatgcagcggatcggcaagggtgacacgagtggcagcatataagcttttcatatgtgtggtatcgtcctgcgccaggctctgtggactccagtcggtttgtgggaaattgccattaaagttgtagaaactgccaatttcatccgggaagatgttggcccaactactgaagtaacgattgttttgtttgctgtaactgccaccaaacattagattgtgctgacgaccaaacaattcataactaccgtcagcgaacaaatccagcgcatcaactttacgtttgccactgttccaaccggtgccgccgacataatcaaagccaggtccataattactgtatggcccaaccagcataccatccgctttgtttacataggcatcgacatacatcattttgctgtcaaattcgacttcagagtgggtggcattcagtgtcgcttgccaggtatcagcaaactgctgcttcagggtcataaagaccttgttgatctctttatcgttgtacgcccagtcaggtgcggtactgcgtgcgcgatcgtaactgttgctgctgccatcagtattccagcgcggtaaaccgccccaggtagggctattaacatcaatgcgctgatattcgtaaccggcactaagcgtcgtaagatcgcctaaatcagcatcgacaatgccgctgaagaaggtcttttcactgttgtagcggtccagccaactgtcgttattctggtagccgccgacaattcgcgcgcggattttaccgtcttcggtgagtgggctttgtaaatccgccacataccgttctttgttccagctaccgtattccgcgctgacatcgcctttaaattcacgactggtcgcgtgttttcgaaccatattaattgccgcagatggattacccgtcccggtcatgagtcctgtcgcgccacgcactacttctacgcgttcaaagagtgccatatcagaaagtgcgtcgcccagattccagcggctttcaaaataggtggggataccatcaaccatatagttatcgatctggaatccgcgggaataataaagagcacgatcggaatccgcctgacttttgctgatccccagcgtgttttccatcacttcgcccagcgtttgtaactgctgatcttccatccgctgctggctaacaatagtgacgctctgaggaatatcacgttgagtcatctgcattttggtacccgcagaggtagacgttacgctgtaatcattttcgccatcatctggagctgtggcactaccctcaacaatcaccgtttcttcagtggctggtgcagcaaaagcggcagaaggtaatagtgccagtgctatgcaaccggcaagtagactcggtttggtgatggcttgatattgattatccctgttaaattgtgtactaagcatttgaaatctcttggtttatgttgtcgtcaggctcatgccggaggagggtgatgagcgattatatttagtgtgcgaataattttgtttgtaaatgcaaatgagaaatatacgcattcatatttgtcatgtaaaccaaacagagaatgtcttttcagcgcattcgcaggcagaaatgggaataatggcgatatatacggcagcaaaacgattttttgcttaagaaatcgtgagttaaggttgaaagagcaggtttaactcgaccatactctatactcgcagtgtggcgcggcgtagcatggcgcaacgcatggctatttgaaaaaggaaaatgtcgtggcagaagaaactatattcagcaaaattattcgtcgtgagatcccctccgatatcgtctaccaggatgatctggtaacggcgtttcgcgatattagcccgcaagcgccaacgcatattctgatcattccgaatatcctcattccgactgtgaacgacgtcagtgctgagcatgagcaggcgctgggacgcatgatcaccgtagcggcaaaaattgctgagcaagaaggtattgccgaagatggctatcgtctgatcatgaataccaaccgccatggcggacaagaggtttaccacatccatatgcacttgttgggtggccgtccgctgggaccaatgctggcgcataaaggtctgtaacgatgagaaaaggatgctttgggctggtgtctctggtgttgttactgctggtgggctgtcgtagtcatccggaaattccggtgaatgatgagcaaagcctggtgatggagagttctttattggctgcgggcatcagtgcagaaaagcccttccttagcacgtctgatattcaacctagtgcatccagtacgctttataacgaaaggcaagaacccgttaccgttcattatcgtttttactggtatgacgccagagggctggagatgcatcctctggaaaggccacgcagcgttaccattcccgcacatagcgcggtaacgctgtacggcagcgccaattttctgggggcgcacaaagtcagactttatctatatttgtaaggggtgaatcttgatgacaaaaatgagtcgctacgccttgattaccgcgctggcgatgtttctcgccgggtgtgtggggcaacgtgaacctgcaccggtagaagaagtgaaaccagcgccggaacaaccagccgagccacaacagcctgtccccacagtgcccagcgtgccgacgatcccgcagcagccaggcccaattgagcacgaagatcaaactgcaccgcctgcgccgcatattcgccattatgactggaatggcacaatgcagccgatggtcagtaagatgcttggggctgacggggtgactgcgggtagcgtcctgctggttgatagcgttaacaaccgtactaacggtagcctgaatgccgcagaagcgaccgaaacgctgcgaaatgcgctggctaataacgggaaatttaccctggtttccgcccagcaactgagcatggcgaagcaacagttaggtttgagcccgcaggacagtttaggcacccgtagtaaagccataggcattgcccgcaatgtcggcgctcattacgtgctgtactccagcgcctctggcaacgttaacgctccgaccctacaaatgcagctgatgctggtgcagacgggcgaaattatctggagtggtaaaggtgccgttagccagcaataagtaaaattatctggtcaggtaaaggtgccgtttcgcagcaataatcccatcacgcgcgacgaattgctgagccgctttttcccgcagtatcatcccgtcacgacgtttaatagtgggcttagtggcgggagttttctcattgaacatcagggccagcgttttgttgtgcgtcagccgcacgatcctgatgcgccgcagtccgcgttcttgcgccagtatcgggctttaagtcaactacccgcatgcattgcaccgaagccgcatttatatctccgtgactggatggtagtcgactatctgcccggcgcggtaaaaacgtatttgccggataccaacgaactggcaggcttgctgtattatctacatcaacaaccacgttttggctggcgaataacgctgttgccgttactggaactgtactggcagcaaagcgatccggcgcggcggacagtgggttggctgcgaatgttaaaacgtctgcgcaaagcgcgggaaccacggcctttacgcttaagtccattgcatatggatgtccacgccggaaatttagtgcatagcgcgagtgggttaaaactcatcgactgggagtatgccggagatggtgatatcgcgctggaactggcggcggtgtgggtggaaaatactgaacagcaccggcaattggtcaatgactatgccactcgcgcgaagatttatccggcgcaattatggcgtcaggtcaggcgatggtttccctggctgctgatgctcaaagcagggtggtttgagtaccgctggcgacaaaccggcgatcaacaatttatcaggctggccgatgacacctggcggcagctattaataaaacaataaggagagcagtgtgggtccagtaatgttggatgtcgaaggttacgaactggacgcggaagagcgtgaaatactggcgcatccgctggtgggagggctgattctctttacgcgtaactatcatgatcctgcccagttacgtgaactggtgcgccagatccgcgcagctagccgcaatcgtctggtggtggcggttgatcaggaaggtggacgcgtgcagcgttttcgtgaaggttttacccgcttgccagcggcgcaaagtttcgctgcgctgagtggaatggaagagggtggcaaactggcgcaggaggcaggttggttgatggccagcgaaatgatcgctatggatattgatatcagctttgcgcctgtgctggatgtcgggcatatcagcgcggcgattggcgagcgttcttatcatgccgatccacaaaaagccctggcaattgccagccggtttattgatggtatgcatgaagccggaatgaaaacgaccgggaaacacttcccaggacacggtgcagtaacggcagacagtcacaaagaaacaccgtgcgatccacgtccacaagcggagattcgcgctaaagatatgagcgtcttcagttccttaatccgcgaaaataaactcgacgccattatgcctgcgcatgtgatctacagtgatgttgatccgcgtccggcgagcggttctccctactggctgaaaaccgttttgcgtcaggaactgggttttgacggcgtgattttctctgacgatttaagcatggaaggtgccgcgattatgggcagttatgccgaacgcgggcaggctagtctggatgcgggttgcgatatgatcctggtctgcaataatcgtaaaggggccgtcagcgtgttagataatctgagtccgatcaaggcagaacgtgttacacgtttgtatcataaaggtagttttagccgacaggaactgatggacagcgctcgctggaaagcgatcagcacccgtctgaatcagttacatgaacgctggcaggaagagaaagcaggtcactaaccctggcttatgtgaggaagcgatgattatctatttacacggttttgactctaacagtccgggtaaccacgagaaagtcttacaattgcagtttattgacccggatgtacgcttgataagctacagtacgcggcatccgaaacatgatatgcagcatctgcttaaagaagtggacaaaatgttgcaactgaacgttgacgagcgtccgctaatttgcggcgttggcttgggcggatactgggcggaacggattggttttctttgcgacatccgccaggtgatcttcaaccctaatttgttcccttatgagaacatggaaggcaagattgatcgcccggaagagtatgccgatattgccactaagtgtgtgaccaacttccgtgagaagaatcgcgatcgttgcctggtgattttgagccgtaatgatgaagcgcttaacagccagcggacatctgaagagttgcatcattattacgagattgtctgggacgaagagcagacgcacaaattcaagaatatctccccgcatttacagcgcattaaagcgttcaaaaccctcgggtaaatgccctcgtcgcatcaggtaaccttgccggtacctgatgcgctccgaattctgtgggtcggataaggcgtccacgccgcatccgacagtcgagcatcaatgcctgatgcgcttcttatcaggcctaccgaacgccctgcatacacccctcactctatatcactctcacaaattcgctcaaataataaacaataaactctgttttttgatctcacccggtaaagtcgcctatcttttcagcaacaaaacttgattaacatcaattttggtatgaccaatgcaccattcatgttattctcaatagcgaagaacattttcattgctgtaacctgttgttaattaagagctatgttaataaccattaattaacaattggttaataaatttaagggggtcacgttgactacgccattgaaaaagattgtgattgtcggcggcggtgctggtgggctggaaatggcaacacagctggggcataagctgggacgcaagaaaaaagccaaaattacgctggtcgatcgtaaccacagccacctgtggaaaccgctgctgcacgaagtggcgactggcagccttgatgaaggcgtcgatgcgttgagctatctggcccatgcgcgcaatcatggtttccagttccagctgggttccgtcattgatattgatcgtgaagcgaaaacaatcactattgcagaactgcgcgacgagaaaggtgaactgctggttccggaacgtaaaatcgcctatgacaccctggtaatggcgctgggtagcacctctaacgatttcaatacgccaggtgtcaaagagaactgcattttcctcgataacccgcaccaggcgcgtcgcttccaccaggagatgctgaatttgttcctgaaatactccgccaacctgggcgcgaatggcaaagtgaacattgcgattgtcggcggcggcgcgacgggtgtagaactctccgctgaattgcacaacgcggtcaagcaactgcacagctacggttacaaaggcctgaccaacgaagccctgaacgtaacgctggtagaagcgggagaacgtattttgcctgcgttaccgccacgtatctctgctgcggcccacaacgagctaacgaaacttggcgttcgcgtgctgacgcaaaccatggtcaccagtgctgatgaaggcggcctgcacactaaagatggcgaatatattgaggctgatctgatggtatgggcagccgggatcaaagcgccagacttcctgaaagatatcggtggtcttgaaactaaccgtatcaaccagctggtggtggaaccgacgctgcaaaccacccgcgatccagacatttacgctattggcgactgcgcgagttgcccgcgtccggaagggggctttgttccgccgcgtgctcaggctgcacaccagatggcgacttgcgcaatgaacaacattctggcgcagatgaacggtaagccgctgaaaaattatcagtataaagatcatggtagcctggtaagcctgagcaacttctccaccgtcggtagcctgatgggtaacctgacgcgcggcagtatgatgattgaaggacgaattgcgcgctttgtatatatcagcctataccgaatgcatcagattgcgctgcatggttactttaaaaccggattaatgatgctggtggggagtattaaccgcgttatccgtccgcgtttgaagttgcattaatcgacgtacactggcggatgtggcataaacgcctcatccgcccttgaggaacagcgcgatcggcagccgcgttgtatcaggcatcctttcagactcctccgaatccttaagtatttccagccattcccgcgcttttcatcttctgtctgatagctgcttttctccttcgcttgcatgattggcataactgcaaagaaggaggtgttcccgtaaataaaagtatgttggcgggtatcgggattggtgtcgcagctgcgctgggcgtagcggcagtggccagtctgaacgtgtttgaacggggcccgcaatacgctcaggttgtttctgcaaccccaatcaaggaaacggttaaaacaccgcgtcaggagtgtcgcaacgtcacagtgacccatcgtcgaccggtgcaggatgaaaatcgcattaccgggagcgtgctcggcgctgttgctggcggcgtgatagggcatcagtttggtggtggtcgcggtaaagatgtcgccactgttgtgggggcgctgggtggtggatatgccggtaaccagatccagggctctctccaggaaagcgatacttacacgactacgcaacagcgttgtaaaacggtgtatgacaagagtgaaaaaatgctcggttatgatgtgacctataagattggcgatcagcagggcaaaatccgcatggaccgcgatccgggtacgcagatcccgctagatagcaacgggcaactgattttgaataacaaagtataacaaggctgtactctgcaatttggcccctcattcgctcaggctgaggggctttttttgcgacttatttcaccagttcgggccataaacgcaaagtcgttccggcaatctgcatcagtttttccaggcttgcaccttcgcgtgcgctgatgctcatcccctgaataatacaattaaggaattctgccagatgtgtcacgtcacagtggggcgggatttccccgcgcgcttgtcgttgacataaaaactgctgcaaagtgcgctcttgcatcgcatggcgacttttcaacgtattggcgatatctccactatctggggagagggtggtgcagttgttgatcatgaagcagcctgccggggtgtctttgctggtaaagcagttggcgatggcagcaaaatagtcagccagcgcagactccacgcttttctcttcacaaaacagctgtgcttcatgcttagcggcaaaacgatcgatatagcggtcgagaacggcacgaaataacccctctttgttggtaaattccgcgtatagcgtgggcgctttggctccggtcgcttcgacgaggtccgcaagagaagtcgcttcataaccgtgttgccagaacaatttcatggccttatcaagcgcggcatccctgtcgaacacttttgggcggccacggcttttttttacacattgtgtactgtcagttgccatgatgccgttgtacctggtgactgtgaatgaaaggttattataaaaataatcacctccgttcaccagtccagatcccataaaaataattgctttctatttaactgaaatttaaagatttttaaattaattaatgattgttataaaaaatatcttgtatgtgatccagatcacatctatcatttagttatcgatcgttaagtaattgcttgcgacgtcattcatctgcataaggccactattatgaaaaacgtaaaaaccctcatcgctgcggcgattttaagctccatgagttttgccagctttgcggctgtcgaagttcagagtacgccagaaggccaacaaaaagtcggtacaatcagtgctaacgcggggacaaatctgggaagcctggaagagcagctggcgcaaaaagcggatgagatgggcgcaaaatctttccgtattacttctgtaaccggtccgaataccctccatggaacagcagtaatttataaataagcattaaccctcattaatgcctgctactgctgattttttccccgcgacatgccgtgtcgcggggatttttttatccgggctttacagcgtttgtgggctcacttgatgacggcggacatccaccggcatcccggaacggacatccatcacatgttgcatcacttcagcgtcagtttgtgctgcatctttaaaactttgcattgcgctattcagcgtaattggcagcagctgcggatcgtcatcaatcttctcactcagcggctgatgtacttcaaccagacgcgcaccgtttggttcggcagagacttttatcggagtgttgatgatattcactttggtgcctggggtgacctggctaaagagtgttttgatatcgtcatcccgcagacgaatacagccagaacttacccgcatgccaatgccgaaatcggcgttcgtaccatgaagcaaataaacgccgccataggccgccagacgaatcgcatgatggcccattgggttatccagtccagccggcactaccgcaggcaactcaattccctgtgctttataacgggcgcggatgtttgccgttggcgtccaggttgggtttgcacgtttgtcactaacggtggtcaccattgtcggtgtcagcgtgtcaccacctaactgaccaatacctattggatacacggttacgctatttttacccggcgggtagtaatagagacgcagctccgcaatgttgatcacaatgccttcgcgcggcgcatctggaagtagggtttgcaacgggatcgttaacacgctgcccgcgcgcggtacgtaaggatcaacgccggggttagcctgtaacagagcgagaaagccgacgttgtattttttggcgatggcttccagagaaccaccgtcattttccaccacatgaaatttgttttcgccaaccagacgactgcccgctggcggcagcggccaggtgttggcttttgccggtagcgccagcgccacggcagcggcgaacgtaaaaaacgttagccagcgagaaaaacgcgttttgatcatcaccaaaaatccataataaatataaggttattgtaataaacagataagcctgaattatggatggtgacagtgtcggatagtgcagggaagtgcaaagaatttgtaaatgttgcagatgggggcgcagaaacgcccccgatttaccattaagcgatcgcgttctcttccagttcacgcataaactggcgtacccattcgatacgcgttttccgctcactcaaatcctgaataaatttcaggcgcgtcggaccatcaaggcggtaatgctgcggctgtttttgcagcaaaccaatcaaccaggccggattaacgtgattcttctcggcaaattcgatcaccccgcctttctcattaccttccagcttcctgatccccagtttctgcgcttgctggcgcagacgggcaatatccagcagggtacgcgccggatctggcagcaggccgaagcgatcgataagctcgactttgatctcttccagttcgttttccgttttggcgctggcaatacgtttgtagaagctcagacgcgtgttcacgtcagggatgaaatcatctggcaataggctcggcatccgcagctcgacttctgtttgctggctggtgagatcttccaggctcggctcgcgtccggctttcagtgcatcgacggcgttttccagcaactccatatacaggctgaaaccgatggtttccatactgccgctttgttcttcgccaagcagttcacccgcgccgcgaatctccagatcgtgcgttgccagcgcaaaacctgccccgagatcttccaggctggcaattgcttcaagacgtttttgtgcatcggtagtcatcgcttttggatgcggtgtcagcaaccatgcatatgcctgatgatggctacgtccgacgcgaccgcgtaactggtgcagctgcgccagaccgaagtgatccgcgcgttcaatgataatagtgttggctgtcgggatgtcgatcccggtttcgataatggttgtacaaaccagcacgttgaaacgttgatgatggaaatcattcatcacccgttccagttcgcgctcgcgcatctgcccgtgaccgatggcgatccgcgcttctggcaccagttctgccagccgttcggcggctttctgaatgttttccacatcattgtagagataataaacctgtcctccgcgcaaaatttcacgcaggatcgcctcccggaccaccatgctgtcatactcacggacaaaggttttaactgccagacgacgggcgggcggcgtggcgataatgctcaggtcacgcattccgctcattgccatattcagcgtacgtgggatcggcgttgcagtaagcgtcagaatatccacgttcgcgcgcatcgctttaatgcgctctttatgacgcaccccgaagcggtgttcttcatcgacaatcagcaggcctaaatctttaaacttgacgtcactttgcagcagtttgtgcgtaccgatcagaatatcgattttcccttccgccacttccgcaaggatttgcgtctgctctttggcgctgcggaaacgggagatcatttcgatacgtaccggccagttggcgaaacggtcgcggaagttgtcgtaatgctgctgcgcgagaagggtggtaggcaccagcaccgccacctgcttgtggttatctactgccaggaaagctgcgcgcatcgccacttctgttttaccaaagccaacatcgccgcacaccagacgatccattgccagcggctgacacatgtcgctaagtaccgcattaatggcctgcgcctgatccggcgtggtttcaaacgggaagctgtcgcagaacaactgatactgctcacgatcgtgtttaaacgcgaagccctctttggcggcgcgttgcgcgtagatatccagcaattccgccgccacatcacgcactttttccgccgctttctgccgcgcgcgactccacgcatcgccgccaagtttatgcagcggggcgttttcttccgcgccacctgcgtaacggctaatcagatgcagactgctcaccggaacatacagtttggcgtcgttggcataggtgagcatcagatactcgccagtaatgccacccgcttccagcgtggtcattccggcataacgaccgacgccgtgctccagatggaccaccggctgaccaatatgcagttccgcaaggttacggatcagtgtatcggggttgatggtgcggcgagaatcctgacgacgacgggcaacgcgttcaccgagcagatcgctttcgcaaatcagcgccagattacgcaccgtatcgacaaaaccatgttcggcagcgccaatcatcagataacgcccacggtcgctggcttcatcaagacgcataatgcgttgcggagcaattttaattcgtgcgagcagttcacccagcgcttcacggcgaccttcactttctacgctgaacaccaccggaccgtcgaaagtctcgaggaacttacgcagcgcatccagcggcgctttttgttgtgcctgaacggccaggtctggcagtttctggaaacctaaattggcattcgcggcttttgtcggtaaatgttcagtttttagctgcacccggggccagtttttcagctcactgaagagctcgtccacccgcagccagaggctttgtggtggcaacagcgggcgcatcggatcgacgccgcgattctcaaaacgcgccagcgtgtcagcctggaaacgttcggcactggtttccagatcgccagtattcacgagcaaggtattggcagggaaataactgaacagcggcggcagtggttcgctgaagaacaatggctgccagtactcgatcccggcaggtaatgtgcctttactcacttgctggtaaatatgttctggatcgcgcttcacttcgaaggtatcgcgccactggctgcggaacagttcaattgccgctttatcggtcggaaattcgtgcgcgggcagcagattgatcgcttctacttcctccagcgtgcgctggctgtcgacgtcaaacacccgcaggctgtcgatttcatcatcaaagaaatcaagacgataaggcagctcactccccatcgggaagagatccagcaacgcgccgcgcgtggcgtattcgccgtgctccatcacctggtcaacatggcgataaccggcgctgtccagttgggttcgtaatgcatctcgactcaggcgctgaccttttttcatcaccagcgcatgaccgtggagaaaactgtgtgggcaaacgcgctgcataagcgtattcaccggaacaatcagtacgccacgctgcatcgtcggtagctggtaaagggtggaaaggcggctggagataatgtcctgatgagggctaaaactgtcgtagggaagagtttcccagtccgccagattcatcaccatttgatcggtaaactggctgatttcatcatgcaaacgcagagcattttgcatatctggtgcaatgagtaccaccggaccggcgtgacgttcggcaatttccgctaccagcgttgcacaggctgcgccggttaactcgcccagcagacgctgctcacccgctttgacgggcagcgtataacgatattgttcaggcataacggttgtcagattctcgttaggatatgcctcaacatatgggggcatatctctgataagcaatgctgttcattatccgtaatcgacatggtttagcaaattgaatcgccccggctggggcgatggcttagcgggagtaactgacggcagcgggcagactaggcggggagaacaacagatcgctgaatgcacgctgactaagttttcttaccagcaagcccgcaacagtacagatgaacaaactgacaaagggataaaccagcaggagtgtcagttcgacttgcgggctccagcgtgctgcgttcatttgcgcaagcagagttaagctgaatatttcaaccagaatgcgatgggtggtgtagatagcaatggtgttggagccaatcacattcagcaggctggtggagcgcataccgaatcgttgctcgtattgataaaacagcttcatgatcaccacaatgcttaccaggctcaacagcaggctgatagtaaacaaccaggcaccgaccgccagaacggtaagcaaagaagccatcagcagatggcggcgcaacggcacctctttaacacaggtcattattgttgcgccaaaccatgcgccaaggctgtaataaggcaaattgcggatcacactgttcattccccaccacggcgtgggaacgaaattaaccgccacactcagcagtacaaacaaggcgaatagtggcagcgccagacggctaaaaattttacataccacgaaatagacaattaacgcatacagataccacaagctggtgctggcggtgatcatcccgtgcaggaactcaccggtggaatcggcataagcggcattggaggcattgcttaaatcgcgctcaggtgccagccactggttcagcgcacttaacgccagccactgcaccacgccccaaagcgccagcacccagaagatgttccagatccgtttatcgagacaatttccccacggtacgctgtcgatatagcggcgaatcaaatagccggatataaagaaaaaaaccggcatacgaaagggggcaaggtaaagattgaaatagatccagcatttgctcaggacttcgcttaacggatgctgaaaagtggtcagatgcggataaaaggtaatgacgctgtgataaatcaccaccagacaaatacataaccctttgatctggttaatccatagctctttttgtttcatcaggacaacacgctcttttttaatttacatgcggttgatcctgcgggttatgacccgaggtgtaatgggtatctgtctgtattggatgatttttcagattaagatcaggcggcaagattgatgataaaacatggcaatttagccgattgatttacgggggcttttcagattagccctgacgatcacttacagttcagacgtttacccatcttgctttcgcttatatactcgtgtctttgctacagcaaccagacggatttcatgtaccaacctgtcgctctatttattggcctgcgttacatgcgtgggcgtgcagcggatcgcttcggtcgtttcgtctcctggctttctaccatcggcattaccctcggggtgatggcgctggtcacagtattgagtgtgatgaacggctttgagcgcgagctgcaaaacaacatccttggcctgatgccacaggcaattctctcttctgagcatggctctcttaacccgcagcaactcccagaaacggcagtcaaactggacggcgttaatcgcgtcgcacctattactaccggtgatgtggtactgcaaagcgcgcgcagcgtggcggtcggggtgatgctcggtatcgacccggcgcaaaaagatccacttacaccgtatctggtcaatgtgaaacaaactgacctcgagccggggaaatataatgtcatcctcggcgaacaacttgccagtcagctaggcgttaatcgcggtgatcaaatccgcgtgatggtaccatctgccagccagttcacgccgatggggcgtattccaagccagcgcctgttcaatgtgattggcactttcgccgccaacagtgaagtcgatggctatgaaatgctggtgaatattgaggatgccagccgtctgatgcgttatccggcaggcaatattaccggctggcgtttgtggctggatgagccgctgaaagtcgacagtttaagtcagcaaaaactgcctgaaggcagcaaatggcaggactggcgtgatcgtaaaggcgagttgttccaggccgtacgcatggaaaaaaatatgatgggtttactgctgagcctgattgtcgccgttgcggcgtttaacattattaccagtctagggctgatggtaatggagaagcagggcgaagtagcgatcctgcaaacgcaaggcttaactccgcgacaaatcatgatggtctttatggtgcaaggggccagcgccgggattatcggtgcgatcctcggagcggcgcttggcgccctgcttgccagccagttaaataatctgatgccgataatcggcgtcctgcttgatggcgcggcgctgccggtggctatcgaacctttacaggtcattgttattgcgctggtggcgatggctatcgcgctgctgtctacgctttaccctagttggcgcgctgccgccactcaacccgctgaggctttacgttatgaataagatcctgttgcaatgcgacaacctgtgcaaacgctatcaggaaggcagtgtgcaaaccgatgtgctgcacaatgtcagtttcagcgtcggcgaaggtgaaatgatggcgatcgtcggtagctctggttccggtaaaagtaccttgctgcacctgctgggcgggctggatacgccaacctccggcgatgtgatttttaatggtcagccaatgagcaaactgagcagcgcagcgaaagctgaactgcgcaaccagaagctgggctttatttatcagtttcaccacctgctgccggattttaccgccctggaaaacgtggctatgccgctgctgattggcaagaaaaagcccgctgaaatcaacagccgtgcacttgagatgttaaaagcggtggggctggatcatcgtgcgaatcaccgcccatctgaactttctggcggcgaacgccagcgtgtggcgattgcccgtgcgctggtgaataacccgcgcctggtactggcggatgaacctaccggtaacctcgatgcgcgtaacgccgacagcatcttccagttgcttggggaattgaatcgcttgcagggcaccgccttcctggtggttactcacgacctgcaactggcgaaacgtatgagccgccagttagaaatgcgtgatggtcgtctgacggcggaactgagcctgatgggggcggagtaatggcgatgcctttaagcttattaattggcctgcgttttagtcgcggacggcggcgcggcggcatggtgagcctgatctccgttatttctaccattggcattgccctcggcgtggcggtattgatcgtcggcttaagcgcgatgaacggctttgaacgcgaactgaacaaccgtattctggcggtggtgccgcatggtgaaatcgaggcggtggatcagccgtggactaactggcaggaagcactggatcacgtgcaaaaagtgccgggtattgccgctgccgcgccgtatatcaatttcaccgggctggtggaaagtggcgcgaatcttcgcgcaatccaggtgaagggcgttaacccgcaacaggaacagcgtctgagcgcattacccagctttgtccagggcgatgcgtggcgcaattttaaagcgggcgaacagcaaattatcatcggcaaaggcgtggcggatgcgctgaaagtgaagcagggggattgggtgagcattatgatccccaacagcaatcccgagcataaactgatgcagccaaaacgtgtgcgtttgcacgttgccggtattttgcagttgagtggtcaactcgatcacagttttgccatgatcccgctggcggatgcccaacaatatcttgatatgggttccagcgtgagtggtattgcccttaaaatgacggatgttttcaacgccaataagctggtacgcgatgcgggtgaagtgaccaacagctatgtttatattaaaagctggattggtacttacggctatatgtatcgcgatatccaaatgatccgcgccattatgtatctggcgatggtactggtgattggcgtggcctgtttcaacatcgtctccaccttagtgatggcggtgaaagacaagagtggcgatatcgcagtattaagaacgctgggggcgaaagatggtttaattcgcgccatctttgtctggtatggattgctggcagggctgttcggcagcctgtgtggtgtgattatcggcgtagtggttagtctgcaacttaccccgattattgagtggattgaaaagttgatcggtcatcagttcctctccagcgatatctattttattgatttcctgccaagcgaattgcactggctggacgtcttctacgtactggtcacagcattgttgctgagtcttttggcaagttggtatccggcgcggcgcgccagtaatattgaccctgcgcgagtccttagcggccagtaaaggcagtacattaaaacaaggagcggcaatgtattacgggtttgatattggtggaacaaaaattgcgcttggcgtgtttgatagcggtcggcagttgcagtgggaaaagcgggtgccgacaccgcgtgacagctatgacgcatttttagatgcagtgtgtgagctggtagctgaagctgaccaacgttttggctgtaaaggttctgtcggcatcggtattccgggaatgccggaaacagaagatggtacgctgtatgccgccaatgtccccgctgccagcggtaaaccgctgcgtgccgacctgagcgcacgtcttgatcgcgatgtacgccttgataacgatgccaactgttttgcccttagtgaagcctgggatgatgaatttactcaatatccactggtgatggggttgattctcggcaccggtgttggcggcgggctgattttcaacggcaaaccgattaccggtaaaagctacattaccggcgagtttggccatatgcgtctgccggttgatgcgttaaccatgatggggttggatttcccgttacgccgctgcggctgtggtcagcatggctgcattgaaaattatctgtctggtcgcggttttgcgtggctgtatcaacactattatcatcaaccgttgcaggctcccgaaattattgcgctttatgatcaaggcgatgagcaggcaagggcgcacgttgagcgttatctggatttattagcggtttgtctgggaaatatcctgaccatcgttgaccctgacctggtcgtcattggtggtggcttaagcaatttcccggcaatcacaacgcaactggcggacaggctgcctcgtcatctcttacctgtagctcgtgttccgcgcattgaacgcgcgcgccacggtgatgcgggaggaatgcgtggtgcggccttcctacatctaaccgattaaacaacagaggttgctatgctgagccgtcggggtcatcggttaagtcgttttcgtaaaaataaacgccgcctgcgcgagcgtttgcgtcagcgtatttttttcagagataaagtggtgccggaagcaatggaaaaaccaagagtactcgtactgacaggggcaggaatttctgcggaaagtggtattcgtacctttcgcgccgcagatggcctgtgggaagaacatcgggttgaagatgtggcaacgccggaaggtttcgatcgcgatcctgaactggtgcaagcgttttataacgcccgtcgtcgacagctgcagcagccagaaattcagcctaacgccgcgcatcttgcgctggctaaactgcaagacgccctcggcgatcgctttttgctggtgacgcagaatatcgacaacctgcatgaacgcgcaggtaataccaatgtgattcatatgcatggggaactgctgaaagtgcgttgtagtcaaagtggtcaggttctcgactggacaggagacgttaccccagaagataaatgccattgttgccagtttccggcacccttgcgcccgcacgtagtgtggtttggcgaaatgccactcggcatggatgaaatttatatggcgttgagcatggccgatattttcattgccattggcacatccgggcatgtttatccggcggctgggtttgttcacgaagcgaaactgcatggcgcgcacaccgtggaactgaatcttgaaccgagtcaggttggtaatgaatttgccgagaaatattacggcccggcaagccaggtggcgcctgagtttgttgaaaagttgctgaagggattaaaagcgggaagcattgcctgatgcactacgcttatcaggcctgcaaggggacgcaattaattgaatttgcgggttttgtgggccggataaggcgttcgcgccccatccggaataatacacgcgcacttttccggcctcttttatcgtttactcgtcaataacaatgcggcaataaacgtacagacaccaattagccctgcccagagtgggcttattctggtaatcgcaaagctattatcgatatacaaacataaagcctgataacccatattggcaatagtcatcgccactgcaaattttaacgcataaataaaacgagtcgtgtagtaaaagatcctggaaaataagataaacgtcgcagcccaggcgataaaacctaatgtgttggtgctgccggggggagcattttcatgctgttgtcctggatgcggataatacgttagtggcggcgtgctttgttttaatatctgtgcttgtagaacagccaatgcattattgattccctgataccagagatctgcatttaaataagccagcgtgtgattttctatcagaaggccgagatgtttatcgtccagaccactttcaacctggccgttggtgatcataattaaccgtggttcgcgggtagtaaatagtaacagaacacttccttttacatcactcaaactagaactcgcatgcgccagcatcgctttaccattttgtctgagactggcttcattattaatgtcgggtaaaaccacaataaacggtgcaattcccgtttgttggcgaaaaagctcggctttatgcgcgatctcttcagcatctggtacagtaccggtaacgtccgtaaaaagtgtcttcattattggaattaatggcttgctggctgctgtcagaggcaggagtatcagtaaactgagcagtataatgaattttttcatgggcgggacttccgtttcctgcgactttttttagaggagggcatacttattaataaaccgacggcgataaaaataacgcccataatgccgataaacccccatttaaaaaaattaacccacgggttatttatctcagccttttcaggatgcccgggagaataataaacattaactttatcgccttcgctgtcttcataaaaatcgctgccgatactgctattgaaaattagcgtgtaatctggcgtcggtcgaaaggcaacgacgggataccagctaccatctttacccgtgcgatgagaatgactggagtgccagacggtatcaacaatgacgccttcggtatgaatcgcgtctttgctataggtgaactggttataaaagacaacaacagaaatgaggatcagtaccagaccgataccgaggaatatacgaaagaaaactttactgtcctgactcattagccacatccttgctaactaaaaaacgggcggtaataccaccgcccgcttgctgaattaacgtcctgctttcagcttctgataatactcttcataaatgctgctggctgcgccaacgtcattctgccattcgccatttttaatggtttcagcatccgggtagagtgttttatcgttcgccacttctggacttaacagcttacgcgccgcaaggtttggcgttggataaccgatagtttcagcaacctgttttgccacatccgggcgcagcaggaagttgatcaatttcagcgcgccttctttgtttttggcatttgccgggatcgccaggctgtccatccagaaaatgccgccttctttcggccacaccacgtcaattggcgtacccgcctggcgtgcaacgaaagcagaaccgttccagatcatgccgaggttaacttcgccttccatgtacgggttcgccgggttatcggagttaaaggctgccacgtttggcatcagttttttcagctcgttatatgcagcttcaatctctttcggatcggtggtgttaccggagtagcccagcttacgcagcgccatctggaacacttcacgggcatcgtcggtcaacagcaggctgcctttgtactctggcttccacagatcggcccagctggtgacagatttcggatccaccgcatcaccgttaacaccaatcgccgtcgcaccccagatatacggaatggagtagtcgttattcgggtcaaaaggcttgttgagcatgtctggatcgagattgctgaagtttgttaacttgctcttgtcgatcttctggatcatcccttctttacgcattttatcaacgtaataggtactaggaaccaccagatcataggcaccgtctttgtatgttttcagcttggcgtacatggtttcgttgctctcgtaagtgctatagataaccttaataccggtttctttggtgaactgttcaagcagtcctggcggcacgtactcggtccagttgtagaaatacagcgtgttgttgtcatcggcgtgagcggcgctcatgcccagtgccagagcacccgccgcgagcaggtggcgactccattttttcatttaacgtcccctgtgttacctttcgttttatcacgagcaataagctggctggcaataaccatcaccaggctcagcaccagtaatatggttgccagcgcgttaacttccgggcttacgccgactttgaccatgctataaatttttaacggcagaatttcataacttggtccggtgacgaagctagaaactaccacatcgtccatgctcagggtaaagcttaacacccagcccgccgccaccgctggcattgccagtggcagaatgatttttcgcagaatggtaaattcgctggcaccgagatctttcgccgcttccagcattcgcacgtcaaaacctttcaggcggctatacaccgtcaccaccacaaatggcaggcagaaggtgatatggctgaacagcaggctccagaagccaagctgaatacccagcagcataaacagcaccagcaggctaatcgccatcacgatatctggactcatcatcaccacaaacagcattccgctaacgaacggcttaccacgaaagcgataacggtacagcgcaactgccgtcagactaccgataagcgtagcaaacgtcgcgctaaacaccgccattgttagactatgctgcgctgcctgtaacaggctgtcgttgttcatcagcaggctataccatttggtggtaaagccctgccagttgatgccaaagcggctgctgttaaaggagttcacaatcaaaataatgattgggatatacaggtacgcgtagatagcggtcataaaaccgccgcgaagcagtcgaccgatcattcgagttccaccttcttattcagcaaacgagaagcgcgccagtaaaccagcaacatcaggcccattacgatagtcagcgtaatgctggtagctgcaccaaacggccagtcacgaatattaaggaactggaccttgatgacgttaccgatcagcaggtttttcgcaccgcccatcaggtcggatacatagaacaggcccatcgctggcagcatcaccagcagacatccggcaataattcccggcatcgtcagtggaataatgatacggataaaagtctgtaacttgctggcaccgagatcgcgcgccgcctcaagcaacggcttatccagtttttcgatactggagtacagcggcatcaccataaacggcagcagaatgtaaaccagaccgataatcaccgcactgggcgtgaacatgatacggattggtgtgtcgataacgcccagccagagcaaaaactcgttgagatagcctttggtgctgaggaaaattttcagcccgtagatacgaattaaactgttggtccagaacggaacaatcagcagaaacagcagcagcggacgcaccttgtgtggcaacttcgccagaaaccaggcaaacgggtagcccagcaccaggcaggcgagggtggcgatcagcgccatattcaggctgtgcaatagcacttcaaaatagagcggatcgagcagacgcgtgtagttatccagcgtaaagaccattttgacaaaactggcgtcgtcgcgggtcaaaaagctggtgccaatgatcatcaggttgggcagaaagacaaacaacacaagccaaccgacaatagtgacaatcactacattctggaacttacttgtgttcttcatcagccagtacgacctcccagctttctacccaattaatggccattttttggtcgagagagtggtcaaagtcaggatcgtcttcattgaagaattcgctgaccatcaccatcttgccattttccagttcaacaacgctctccagcgtcatgcctttgtagttacgctcgcgaacgtaaccaatcagcccttcagcgtggttgtcgtcgttaatctcttcaacacgtaagtcttccgggcgcagcagaacatgcagtttttgccccggttcaacggcgaagttaacgtagatattacattcgcggccttcaacgttggcgcgtacgcgctgctcgtctagacgttcgatgacagtggcgttaaacatattgatttcgccaatgaagccggcaacaaacaggtttttcggctcttcgtagatttcacgcggcgtgccgtcttgctcaatgcgaccatcgcgcatcaccacaatcctgtcactcatggtgagtgcttcttcctggtcgtgagtcacaaagacgaatgtaatgccaagcttacgctgtaacgctttcagctcgttctgcatttgcttacgcagtttgtaatccagcgcactgaggctctcatccagcaacaacagacgaggcttgttaaccaccgcgcgagcaatggcgacgcgttgctgttgaccaccagagagctgatgcggtttgcgttgagcgaaggtttccaactgcaccatccgcagggcttccatcacgcggggcgtaatttcagcagcgggggttttttgcatgcgcaacccaaaggccacattttcgaacacggtcatgtgggggaaaagtgcgtagctttggaaaacagtgttcacatagcggttttccgccggaacgtgggtgatgtcctcgttatccagcatgatgcgtccggaatcaacagtttccagacctgcaatcaggcgaagaacggttgttttaccgcagccagaagggccaagcagcgtgaggaactcgccattgttgatagtcagatccagctggggaatgacctctttaccatcaaagcatttgcgaattcccgccaattgcaccagcggactaaggctactcggttgtttattcaattttttactctgtcccatgtaaacgcaacggatggcttaccgatgcggggtttgtggttaaccaccttggtgactcttaatgagggcggtaattctacggcaaaccgcttgaatcgccaatctttgttgtgaattactggcttagctttatattcattaaggtaatgctgataaatattcccgcttgcaggggtaaaagtgacctgacgcaatatttgtcttttcttgcttcttaataatgttgtcacaaaaagtgagggtgactacatggataaactacttgagcgatttttgaactacgtgtctctggatacccaaagtaaagcaggggtgagacaggttcccagcacggaaggccaatggaagttattgcatctgctgaaagagcagctcgaagagatggggcttatcaatgtgaccttaagtgagaagggcactttgatggcgacgttaccggctaacgtccctggcgatatcccggcgattggctttatttctcatgtggataccagtccggattgcagcggcaaaaatgtgaatccgcaaattgttgaaaactatcgcggtggcgatattgcgctgggtatcggcgatgaagttttaagtccggttatgttcccggtgctgcatcagctactgggtcagacgctgattaccaccgatggtaaaaccttgttaggtgccgatgacaaagcaggtattgcagaaatcatgaccgcgctggcggtattgcaacagaaaaaaattccgcatggtgatattcgcgtcgcctttaccccggatgaagaagtgggcaaaggggcgaaacattttgatgttgacgccttcgatgcccgctgggcttacactgttgatggtggtggcgtaggcgaactggagtttgaaaacttcaacgccgcgagcgtcaatatcaaaattgtcggtaacaatgttcatccgggcacggcgaaaggagtgatggtaaatgcgctgagcctggcggcacgtattcatgcggaagttccggcggatgaaagcccggaaatgacagaaggctatgaaggtttctatcatctggcgagcatgaaaggcaccgttgaacgggccgatatgcactacatcatccgtgatttcgaccgtaaacagtttgaagcgcgtaaacgtaaaatgatggagatcgccaaaaaagtgggcaaagggttacatcctgattgctacattgaactggtgattgaagacagttactacaatatgcgcgagaaagtggttgagcatccgcatattctcgatatcgcccagcaggcgatgcgcgattgcgatattgaaccggaactgaaaccgatccgcggtggtaccgacggcgcgcagttgagctttatgggattaccgtgcccgaacctgttcactggcggttacaactatcatggtaagcatgagtttgtgactctggaaggtatggaaaaagcggtgcaggtgatcgtccgtattgccgagttaacggcgcaacggaagtaagcgaaaagggatgcggcatgtgatgccgcatccggcttaaatccaaacttacccttcgaagaaccaatacccgctattgaccagcgccgcgagcatcgcgaggaaactcggatcttccagcgcatcgccaaaattctccgcagtcagcgcaatgttgctggcgagtgcatccagtgccggacggtgcggggaatcgatcttctcaccattggcatacacgtcgtcgccaatgcgcaatacgcgcagaccacccaggcgcaccagcacttcaccttgtttcagcgcatcgtagatttcatccggctgataaggcggctctggcggcgcgatatccagttcatgacgactctgggatataaactcgccaaaccattgcttaaagtgttccggctggttgatcaattcgagcatcatctcacgcagtttatccatctcttgcggcagaacatccgcaggatgagcgcgaggtggaacatccggatcgctgtagtagttgccgcccagttcacgttgcagcacataatcggcaaatccactaatcagttcccgcgtatttggcgcgcgaaagcccacggaatagttcatcgcattttccagcgcgtagccttcatgcgggaatcctggcggaatataaagaatatcaccaggctccagctcttcatcgatgatggcttcgaacggatcgacctgtaacagatccggatgtgggcagtgctgtttcatttgcagcttttcgcccactcgccagcgacgacgtccggtaccctgaatgataaacacgtcgtactgatcgagatgcgggccgacgccgccgccgggtacagaaaaagaaatcatcagatcatcaatacgccagtccggtagttcacggaacggtcgcatcagcgcggcggtcggctcatgccagtggttcactgcctgtaccagtaaactccagttggtttcaccgagatgatcgtagctttcgaacgggccgtggctgacctgccatttgccatcctggtgactgaccagtcgactgtcaacttcgctttccatcgccagacccgccaactcgtctggagagatcgggtcaataaaattattaaagccgcgttttaacaccaccgggcgtttctgccagtgacgttcaagaaaatcgggccagttaagagtgagttggtattccatgttaagcatccacaggctggtatctgcaaccgattataacggatgcttaacgtaatgcgtgaagtatgggcatatttattcatctttcggcgcagaatgctggcgaccaaaaatcacctccatccgcgcaccgcccagcatgctctctccggcgacgattttaccctcatattgctcggtgatttcgcgggctaccgccagccctacaccttgcccagggcgtaaagtatcaacccgttgaccacggtcgaaaatgacctctcgcttgcttaatggaataccggggccatcatcctcgaccacaatatagagatgctcgtcggtttgccttgcagaaatttcgacaaactcgaggcaatatttacaggcattatccagcacgttgcccatcacctcgacaaaatcgttctgctcaccgacaaagctgatctctgggctaatatcgagagagatattgacccctttgcgttgatacactttgttcagcgcactggtgagattgtccagcagtggggcgaccggatgcagctcgcggctgagcaatgtcccgccgcgcatactggcacgatgcaggtagtagccaatttgctgactaatgcggctgatttgctccagcattaccggctcagcatcactgacgctcatcttttcactacgcagagaacgcagcgtactttgcagcaccgccagtggcgttttcagactatgggtcaggtcggtgagcgtcgtacggtatttgtcgtaacgttcgcgttcactttttaacaatcggttcaggtttcgtaccagactggtcagttctcgcgttgtggctggattgagcaattcgcggttatgttcttccagttcgcggacttcttttgccagggcttcgatggggcgtaaactccaccaggcggcgacccacagcagcgggatcactaacagcagattggcactgagcacatagataaaccagctccagaccatataggaactttttagctccaccggaatggtatccaccaccacaatggttaattttggcatccggcttgttgccgggtagacgtttactgccacgctgtgggtcatctccgcgtcgtcatcatcttcccgcacttcctgcaactgttgctgtatgctatgatctccactcagcaagaggctggtatcgttaacatccgcttcaatttcatgaaaaccattgcttttcagccagtcaggctggatcatcttcatcagccagggcacgtcacgttgcgcccataaaagctgcccgttctcatcataaattagcgtcatggtggggctttgcttgtcgatattttcgggtaactcgacatgcaacttattgttttcccacttcgcaagggtatagaacagattgctctcgccacgtaacagccgaaacgtagttttatcgaaactgacgctataaccgatcagcgcgaccattccgtaggcaaggctaagcaccagtactaccgctgccgttgccaacagaaaacgtacccgcaggctgagcgggaaaaaaagacgcagtaattttttcatcagcgcaattcgaacagatagccctggccgcgaacggtggtaatcacttcttggggatattgtgcctgaatttttttgcgcagacgtcccatcagtacatcaatggtatggctttcccgcagctccgcatccggatagagttggagcattaagctatctttgctgaccactttgccattattgcgtatcaacgtttccataatagtgtattcgaacgcggtcagtttgatcacttcgtcattaatagataattcacggcgagagagatcaacctgaaacggggggaggctaatgacctgactagccagaccgctattacgccgcattaatgcctgcattcgcgccatcacctcttcaatatgaaacggtttagtcacataatcatcagcaccggcacttaatacttcgactttgtcctgccagctttcacgggcggttaataccagaatcggcagactaacatcgttgctacgccagcggcgaatcagactcagaccgtcctcgtctggcaatccgagatcgacaatcgcaatatccggtatatgttcattgagataataatcggcttctttggcatcttctgcgtcatcgacctgatgaccagcatcctgaatctgaactttaaggtggtgacgtaacaacgcattgtcttcaacaaccagtacgcgcatttttatttctccctgtcttaattattaaaatagtgtaacgcgattatgtggttatgggggtaaacattaaataaaccagcggggaggggaggtaaagtgaaaaaataaaaagcggataatcttaataagcaggccggacagcatcgccatccggcactgatacgaggtttatttcagctcatcaaccatcgtgatagctcgaccaatatagttagccggcgtcatcgctttcaggcgggctttctcttcttctggcaacgccagaccatcgataaactgcttcatgccttcggcgtcaacgcgcttaccgcgagtcagctctttcagcttctcgtacggtttttcgatgccatagcgacgcataactgtctggattggttcagccagcactttccagttgtgatccagttcatccagcagatggtcacggttcacttccagtttgctcacgcctttcagggtggattgatatgcaatcaaggcataaccgatacccacgccgaggttacgcagcacggtagagtcggtcaggtcacgctgccagcgggaaaccggcagtttgcttgccagatgctgcaataccgcgttggaaaggcccagattcccttcggagttttcgaagtcgatcgggttaactttatgcggcatggtggaagaaccaatctcaccagcaatggttttctgtttgaagtggttaagggcgatataaccccagacgtcacggtcaaagtcgatcagaatagtgttgaagcgcgcaacgcaatcaaacagttcggcaatgtagtcgtgcggttcgatctgggtggtgtacgggttccactgaatacccaggctggtgacgaactcttcgctgaactgatgccagtcaacttccgggtaagcggcgatgtgggcgttatagttaccgaccgcgccgttgattttgccgaggatctccacctggttaagctggcggtactggcgctccatacggtaggcgacgtttgccatctctttaccgatggtactcggcgtggctggctgaccgtgggtacgagacagcagcgggatatcgcgatactgaacggcgagatctttaatgccatcaatcagttgacgccagtatggcaggatcacttcatcacgcgcggttttcagcattaatgcgtgggagaggttattgatatcttcgctagtacaggcaaagtggatgaattcagaaaccgcgtgcagttccgggatctccgccactttttctttcaggaaatactcaaccgctttaacgtcgtggttagtggtacgctcgatagttttgatgcgcgccgcatcttcttcgctgaaactggcgacgattgcatcaaggtaaccgattgcgtcggcagcaaaagcaggaacttccttgatcgctgcgtgcgcggccagtttttgcagccaacgtacttcaacttgtacacggaatttcagcaaaccatattcgctgaaaatcccgcgcagcgcgctgactttatcgccgtagcgtccatcgacaggggaaacggcggtcagactggataattccatagatcacaactccggggttaaatgagcaagaatttgttttgcctgagtggtcaggcgattacgagaaaacatcagttgcagacgtccgccgccgacctggtgccagagcacggcggcgcgaatgcctgccagcagggttgcgcgaactttcgcctgcacttgtgggctttgcagtacagcaggggaaccggtgacctgaatgcgcgggccaagcgggctaatcacatcaacatagatagcagccatcgcgctcatcagcgtttcggactgtaaatcgaagtgttcgagctggcgttgcaggccgttgatccggttgcccagagtgtcgagcgcgcctttcgcactggagagtttgcgctcaagcaccatcaagctgagtgtgtagcgggttaattcggcgtttaagccctggcgactgctggcattgagcacgccgagcagggtttccagcccgacgcgcaggttggcttcgctaccgccaaaaaccgccagcgtgctgctggggttcatatcaataatactgttgagactgacgtgtagcgcatcggcatcacaatgcccctggtgagcgagttgttgcaccaggcgtgcgctctgacaaataccggccagggcgagggtgatgtcatagtaattctttgccacgttcactgcttccttgttttaagtaaagataataatcagaccggcagcggcagacgctgctcaataataccgccaccgaggcacacttcaccgttatagaagacggcagactggcccggcgtcacggcggcaaccggttcatcgaaaatcacttcaatgcgatcatcgtccagcgccttgacggtgcaagggatatcggtctggcgatagcgggtttttaccgtgcaacgcatagtgccggtgaatggttcgcgatcgacccagtgcaactgctgggcaatcaacccgacagacatcagccgcgggtgttcatggccctgagcgacaaccagaatgttgttttcgacgtctttgtccaccacataccacggttcttcggtaccttctttggtgccaccgatacccagacctttacgctgaccgagagtgtgatacatcagcccctggtgctcaccaatttcatcgccatcgacggtaatgattttgcccggttgcgccgggagataacggcccaggaactcgcggaatttacgttcgccaatgaagcaaatgccggtagagtcttttttcttcgcggtgaccagaccaagatcttcagcaatcttacgcacctgcggtttttccagttcgccgaccgggaacaggctttgcgcaatctgctcatggctgagcgtataaaggaagtagctctggtctttattgctgtccagaccacgcagcaggcggctcttgccatcgacatcggcccgacgtacgtaatgaccggtagcgatataatcggcacctaaatcttcggcggcaaattcgaggaaggctttaaatttgatctctttgttgcacagaatatccggattcggcgtgcgaccggctttatattcggcaaggaacagttcgaagacgttgtcccagtactcggcagcaaagttaacggtgtgcagttcaatgccgagcttgtcgcagacagcctgggcatcagccagatccgctgccgctgtgcaatattcctcaccgtcgtcttcttcccagttcttcataaacaggccttcgacctgatatccctgttgttgcaacagccaggcagaaacggaggaatcgacaccgccggacatgccgacgattactttttttgcggtttcagacattggatcactcacgacattgaacttcaaggcggcgtattctatcacgcagccttttagatgacaccctttgtaaaaggccagttaaaatcgccaatcatctccagcggataacgttgcccgctttgataacaacgaatactttccgccaccagcgggctacgaagattactcgcctgtaaaatttcttcggcgctgacccaacggcagcagtcgatatcgctgtcatgaggctgggtcgggcatatttgctcaagctcaatggcaaagaggaaacgcaaaaacggcgttttatctggcgcaatccactgatgcatacgaataaagtgttgcggctgcgcgctgatgccggtttcttcccacagttcacgggcggcggcttccactaaggtttcatcggcttccagatgcccggcaggttggttccataacgctttaccattaatcgtctcttcaacgactaaaaatttgccttctgcgtgcaccacgcaagcaacggtaacgtgcggtttaaacattttgcatccttaatctgtcacttctcgccattcaccattggcaagattatccaaagagtaatcacccatcgcatagcgaatcagtcgcagcgtggggaagccaacatgggcggtcatgcggcgcacctggcgattacgtccttcatataaggtgatcttcagccagctggtgggaatacttttgcgttcacgaattggtggattccgcggccataaccacgcgggttcgtcaaccagctccgcgccggcgggcagggtagggccatcatttaaggttacgccattgcgcaaggcttcaagtgcgtcttgtgtgggaataccttccacctgcacataatagatttttccggtgcgtttacccggctgggttaaacgcgcctgcaacgcgccgttattggtcagcaccagcaacccttcgctatcgcggtcaaggcgacctgctgcataaacaccctgaaccgggatgaattcttttaatgttttgcgtccggcttcatcggtgaactgcggaagaacatcgtagggtttattgaacaggatcacacgcgtgggctggttttcaggtttacgcctggtagaacgttggctgctgaatcgcttaacctggtgatttctaaaagaagttttttgcatggtattttcagagattatgaattgccgcattatagcctaataacgcgcatctttcatgacggcaaacaatagggtagtattgacaagccaattacaaatcattaacaaaaaattgctctaaagcatccgtatcgcaggacgcaaacgcatatgcaacgtggtggcagacgagcaaaccagtagcgctcgaaggagaggtgaatggaaagtaaagtagttgttccggcacaaggcaagaagatcaccctgcaaaacggcaaactcaacgttcctgaaaatccgattatcccttacattgaaggtgatggaatcggtgtagatgtaaccccagccatgctgaaagtggtcgacgctgcagtcgagaaagcctataaaggcgagcgtaaaatctcctggatggaaatttacaccggtgaaaaatccacacaggtttatggtcaggacgtctggctgcctgctgaaactcttgatctgattcgtgaatatcgcgttgccattaaaggtccgctgaccactccggttggtggcggtattcgctctctgaacgttgccctgcgccaggaactggatctctacatctgcctgcgtccggtacgttactatcagggcactccaagcccggttaaacaccctgaactgaccgatatggttatcttccgtgaaaacagcgaagacatttatgcgggtatcgaatggaaagcagactctgccgacgccgagaaagtgattaaattcctgcgtgaagagatgggggtgaagaaaattcgcttcccggaacattgtggtatcggtattaagccgtgtagcgaagaaggcaccaaacgtctggttcgtgcagcgatcgaatacgcaattgctaacgatcgtgactctgtgactctggtgcacaaaggcaacatcatgaagttcaccgaaggagcgtttaaagactggggctaccagctggcgcgtgaagagtttggcggtgaactgatcgacggtggcccgtggctgaaagttaaaaacccgaacactggcaaagagatcgtcattaaagacgtgattgctgatgcattcctgcaacagatcctgctgcgtccggctgaatatgatgttatcgcctgtatgaacctgaacggtgactacatttctgacgccctggcagcgcaggttggcggtatcggtatcgcccctggtgcaaacatcggtgacgaatgcgccctgtttgaagccacccacggtactgcgccgaaatatgccggtcaggacaaagtaaatcctggctctattattctctccgctgagatgatgctgcgccacatgggttggaccgaagcggctgacttaattgttaaaggtatggaaggcgcaatcaacgcgaaaaccgtaacctatgacttcgagcgtctgatggatggcgctaaactgctgaaatgtagtgagtttggtgacgcgatcatcgaaaacatgtaatgccgtagtttgttaaatttattaacgggagcgtaacgctcccgttgttttttgttaggctgctaacggttatcaaaattttatcaaaaaaagttatcaaaacccctcggtagttttggggtaggctggccggtcaggtggtagttctactactagtctcccacatagatattccttagctttttattattgctggcggacgctcgttaatatttaaggtcttcattgattaagacatccccaaagttagttatgtattcactgttattaggacaattatgaattaccactccttacacccgctcaaatattgttaaattgccggttttgtatcaactactcacccgggactcgccaggggacagccaacaggcattgggtgcaatcaccttagcgttcaggtacatgcggaatgtaaaaaaggccgcgagcgcggccccttcacatacatctttagtactgagactgtttaacctagggaattattatcgtattatattgcattacaactcccaacagtgacatatgaacttcctgctttactccacgactttaatatttcaaggccatgtgaagaacatatttcttgcactgcgagttcatcgagtaatccatagtaagaaacactttttgaatttttgtaaatgtatccgtaaagatgttttcttcctgtttcgtattttttgaagtatgagcttttatattgatttacaataagagtctcacctcctgattttagtaatctcttgatgctaagaactatcagataattcaaagcgtggctgtgatgataggaattatgttttttacgtgaatgagaataatcttaaatgaggaataactcattgattgacaatatttttattcaagaagtgtcattgactgttaacgcaatgttgtaaaggtaagataatctgatttatcaatattattgtgtgatttttatgtgagcagaagatattcatcagcaacgattacattagtcattttattttgccgacggcctcattgtcgaaagataagcgtacgacagtattatcagaaaagagtgattttttatccaactacacttcagcgcactgcgtgtaaaaaatgcctctttcttatgcgggatatcatcatttcatcatgatgtctttggtgagcggtgaacacaatgcacctgcgctgtctcttcaggatgaatcccctggtctggtgcctgcgggctgatgttgcagcagagcttaggagtcttagacgctactatcatttatccaatggcatggaaagcaaaagtgtcgatacccgcagtatatatcgtgaactgggtgcaacgctgagttacaacatgcgcctggggaacggtatggaaatgaaccctggctgaaggcggctgtgcgcaaagaatttgtcgatgataaccgggtgaaggtgaataatgacggtaatttcgtcaatgatttgagcggcagacgtggaatataccaggcagctattaaagccagtttcagcagtacgtttagcggacatctcggggtggggtatagccatggtgccggtgtggaatccccgtggaacgcggtggctggtgtgaactggagcttctgaccatcaacgattaaactgcgcttcggcgcagttttcgtttacaggatgttgaaagggaaaattctggggcaaaaaaagcccgccagttacggcgggaaacctcatcctatgggagaacaatgaataatgaaattgcggggttatcatctcccagtatatccatactaacaataaggttatttactcaaccaggcataaacattttgttttgtgcgtgggaacagccttaaggtgtaaagggggaggtggaaatagcaatgaggagtatcagcaagaatactcgccgctttaccacaacgtggatgagagggatgaaaaactcaaggcagagataactctgccttgaagataaatgcgcttttacagcgggcttatttcagctcttctgcttccggtaaggtcacgttcagctcaagaatagaaatatcgccatctttttgctcaagctgtacggttaccatctcaggatcaatttgtacgtatttacaaatgacctcaagaatatctttacgcaactgcggcagataatgcggttctgcatcgctgcgacggcgttcagcaacaataatctgcagccgttcttttgcaatgttggctgtgtttttcttccggctgagaaagaaatcgagtaatgccataacttatcctccgaacaagcgtttgaggaagcctttcttctcttcttcaatgaagcggaaaggacgttcttctcccaacagacgttctacggtatctgcgtaggctttacccgcatcggcgttaatgtcgagaatgaccggttcaccctggttagaggcgcgcaatacactttgatcctctgggatcacgccgacgagtttgatgcgcaggatctccagcacatcttccatgctcagcatgtcacctctgcttacgcggcctgggttatagcgcgttaacagcaggtgctctttaataggctcttcgccattttctgcgcggcgacttttgctcgccagaatgcctaaaatacggtcagagtcgcgtacactggagacttccgggttggtggtaataatggcttcgtctgcaaaatagagtgccattaacgcaccggtttcaatccctgccggggagtcacaaacgataaattcaaaatccatcgctttcagatcatcaagaactttggcgaccccttcacgggtgagggcatctttatcgcgtgtttggcttgccggcagaatatagagattttcagtacgcttatctttaattaacgcctgatttagcgttgcatcgccctgaatgacgttgacgaaatcgtaaacgacccggcgttcacaacccataatcaggtcgagattacgcaggccgatatcaaaatctatcacgacagttttctttcccttctgggccaaaccagtggcgatggccgcgctggaggttgtcttaccaacaccccctttgccgctagtaacaacaataatgcgtgccatagaaattccttgttaaaaagggatcaatttaacggttgaacggtcaaagcgttttcgactaactgcagtcgcgccgctttgccataaaattctgctgggatttgatcactcagccagtattcacctgcgatggacaccagttccgccatcaggttcgtacaaaatatttgcgtttcccggtcaccacttgcccctgccagcgcacgaccgcgcatcatgccatagacatgaatgttcccatcggcaatcaattcggccccagcgctaacgtggcttgtaacaatcagatcacattgtggagcataaatacgctgaccggaacgcaccggggtatctattaaacgcgtttttgtgaccggcgttgtattttgcgctggagcctgcggtgtgggagctggacgtggcgctttttcctttccttccgtcaggataggcagccccatcttttcaatttcggctttaagttgcgcatctttgcagccacttacgccaataacccgcaaaccggttgcgctaaccgccttatgcatcgcactccagtttaccgggtcttccagtgcactgacgttgagtacaacgggggcatgttttaaaaatgcgggggcctgagcgattttgtcttccagcgcctgatggataaccttaggttctgcctcatgcagatgaaccacagataaagtgaagctactgcctttaagctcgattggcgtgttactcatcctggccttactcaattagctattaatcatcgccagcgcgcgatgatgttccgaagactataaggcatgttatagtctggattatattgaggcaagtcaccctcccatttattcagagtaaaagtctattctgtgataaatggcgctgattcatagcttaaaaaatacccttgtcaatcaacccattgccgtcgtacttttgattgttcttatttacgcttcctttttccgcaccctaatcgtgacagcatctccagacctgtttaaatatccagtattgaggcaagtgtattttttcaccacgccaggctttcttaactttccattttttgcggcatcattaaagaacagatacccgttatcttaatatccgccacagaattgctctatcatagaaaccgcagaagacgtctgatacttctgtcaggtcatcgtaactcgtccaggtcagcggttttgattacggattgatgatgaaatgagcataagtgttgtacggttggattatcaggatgtgctatgaatatgatgcgtattttttatatcggattgagtggtgtggggatgatgttcagtagtatggcgtctggaaatgacgctggcggacttcaatctccggcgtgcggcgttgtttgcgacccgtatatttgtgtgaacagtgatggcatttccccagagttaacaaggaaatatctcggcgaaaaagccgctgaaaacttacaaagtttacaaggctacgatcccagcgaatttacattcgctaacggtgtattttgcgatgttaaagaaaaattatgtcgtgatgatcgttattttggtgtggatggtaagcggagtggaaaaatcaatcaaaccaccacaaagatgttatttatgtgtcgtgagtgatgtcttgtttacattatgttctattcgtcattaacctcttgagcgacagagaggagtggggcattaacgtttatgacggggagagtccccgtcggttgacatttacttaatttgaatatcgacgttatattttttagttttgtttttacgggcgtcgtttcgggtttgcaacactcgcagctcatatttgccagaagcagggagactgtattgtccgtgactatcgagttctggggaatatctggataaatcaacactatcatcgattcctggcccgaagaggtaagtatcagcgccttcattagagatactcacatgcactttctgaccttttttggcatagaaggtatatgtatcgtaatcgtatccctttatttcgccggagtactgagcgctgctatggccttttctgaactcaacattgacattcttacccgcagcaaagctcgtggaggttagcagtgcaagcagcaatacagccttcctgatgctcttgattttcattggtagtctcctgttcagaatgagtacgatgaactgttataatataacaatccctaacgggagaattccagtggctttcctgcgttcggtaaaatcacgttgcggcatttttgccggggggattacttataaagggggcatggactcaacaaaccgtagaaatctacagctggctggcttgtggcgcgggtttcattgatgttagcttatgccaaaacctggcatcttaaagagtaaaagtatgttttgtgtgatttatcgaagcagcaagcgtgaccagacctatttatatgtcgaaaaaaaagacgattttagccgtgttcctgaggaactgatgaaaggttttggtcagcctcagttagcgatgattctgccgctggatgggcggaagaaactggtcaatgccgatattgaaaaggttaaacaggcattaaccgagcaaggttactatttgcagttaccgccaccacccgaagatttgctgaagcaacatctttccgtcatggggcagaaaacagacgacactaacaaataaccgatatccggcggtggcattatctttgtcggcgcgggttttcatatccacgataaggtgaggggaacgttatgtatcaacatcacaactggcaaggtgcgctgctggattatccggtgagtaaagtagtctgtgttggcagtaactatgccaaacatattaaagagatgggcagcgcagtgcccgaagagccagtgctgtttattaaaccagaaacggcactgtgcgatctgcggcagccattggcgatcccatccgatttcggtagtgttcatcatgaagtcgaactggcggtgttgattggcgcgacactgcgtcaggctacggaagagcatgtccgcaaagccattgccggttatggcgtggcgctcgatctgacattgcgtgatgttcagggaaaaatgaagaaagccgggcagccgtgggaaaaggctaaagcgtttgataactcttgtccgctttccgggtttattcccgcggcggaatttaccggcgacccgcaaaatacaacgctgagcctgagcgtaaacggcgaacaacgccagcaaggtacgactgcggacatgatccataaaatcgttccgctgatcgcttatatgagcaagttttttaccctcaaggccggtgacgttgtgttgacaggcacgcctgatggcgtcggcccgttgcaaagcggtgatgagctgacagtcactttcgatgggcattctttgacaactcgcgttttgtaatactttttgccgcctgaaagcggcggcaaaacttgcatcgctgtgccagactggttataaggtgcgttttaacgtaatggcggaacacctgatgagcgatgtacctttctggcaaagtaaaaccctggacgaaatgagcgatgcggaatgggagagcttgtgtgatggttgcggtcagtgttgcctgcataaactgatggatgaagacaccgacgaaatctacttcactaacgtcgcctgtcgccagctcaatattaaaacctgtcaatgtcggaactacgaacgtcgtttcgagtttgaacccgactgcattaaattaacccgtgaaaatctgccaacattcgaatggctgccaatgacctgcgcttatcgtttgctggcggaaggtaaagatttacctgcgtggcatccgctacttactggtagcaaagcggcaatgcatggtgaacgtatctctgtgcgtcatatcgcagtgaaagaaagtgaagtgattgactggcaggatcatatcttaaataaacctgactgggcgcagtgataaatttaatagatgctgatgggggctttcttaatatacgtctggatgctcgccatttcgtagccctgtttttgaaagcgctctgtcataatgagagttacccgataccttattatcaacaggtaactctcaatctttaaaaaacgtctgtgtttttaaatgtgataaaccttataccttgagtacatggagagaataatcgcttatcagacttcaggtacctcaaagagtgtctttttaccgtgtcttttctgatactcattacaggtgttaatcatttttttggccgcttcttttagcaaagaaagcattaaatcatcataatcaacgtagaatctggttgtttcagtttccgtttttatctcaccgatggcggctatttcggtggttaatttcaatttggcggcatcgatatctttattcgcttgtttaaccgtgttagacagggtggtaaagaaattctgcacagattttaacttgttcttcaattctggaatcagttttccttcaactacgcccgcagcaatagaataggaaatgattaatccaaatggaccggcgacgacaccggctgcggcaccggcatatgcttccttcctgattttatctacctgactctggaaatagctgcttttttcactaaaatcattggttaactggctatctaacgccagcagtttcccggaagcgttgttgaaactttgactgcttaccagcagggatttttgcgcttcattcagcttcgtgatgccgtcatccagtaccttaatgagaatgtctttctgggcggatgctttcttctcattgtactcatcaaatagcaaaatatacgctgcgagcaattgcgtcgcaacaccacaccattcatacactgtttgggttgcttcaaaatacttatcctggctatccataagtaaggttttaatatcgccgactaaaacggaggctgcctgactatactcctgtttaaagcgacttaactcttttatggtttcatcaaaggtctgccaggggatgacctgatcgagatatttattataaagatctaatgctccatctgcggtttcgattgcgtttttaactacttctaccgttttatctgcaacgatttcagtcataatcattcgcctctttaaatatataaattgtaatgaaactcctgttttacaactattaataaattttacttcatctaattcatagttagccgggcgggatgcgtcaatgtctttatttctattaatatgataaatatcaaacaatgtttaatgtcattatggcgaatgcttctattctattttttagccgggtgatatttttcatttctgctggatgagcgtcgtcgccagaaggccacgtgagcacaagataagagaacgaaaaatcagcagcctatgcagcgacaaatattgatagcctgaatcagtattgatctgctggcaagaacagactactgtatataaaaacagtataacttcaggcagattattatgttgtttatcaagcctgcggatctccgcgaaattgtgacttttccgctatttagcgatcttgttcagtgtggctttcctagtccggcagcagattacgttgaacagcgcatcgatctgaatcaactgttgatccagcatcccagcgcgacttacttcgtcaaagcaagtggtgattctatgattgatggtggaattagtgacggtgatttactgattgtcgatagcgctattaccgccagccatggtgatattgtcatcgctgctgttgacggcgagtttacggtgaaaaaattgcaactacgcccgacggtacagcttattcccatgaacagcgcgtacagccccattaccatcagtagtgaagatacgctggatgtctttggtgtggtgatccacgtcgttaaggcgatgcgctgatgtttgccctctgtgatgtaaacgcgttttatgccagctgtgagacggtgtttcgccctgatttatggggtaaaccggtggttgtgctaagcaataatgacggttgcgttatcgcccgaaacgctgaggcaaaggcgcttggcgttaaaatgggcgatccctggttcaaacaaaaagatctgtttcgtcgctgtggcgtggtttgctttagcagcaattatgagctttacgcagacatgagcaatcgggtgatgagcacgctggaagagctaagcccccgcgtcgagatttacagtattgatgaggcattctgcgatctgacaggtgtgcgtaattgtcgcgatctgactgattttggcagagaaattcgcgcaacggtgctacaacgtacccatcttactgttggtgtggggatcgcccagaccaaaacgctggctaagcttgccaatcatgcggcaaaaaaatggcagcggcagacgggtggggtggtggatttaagtaatctggaacgccagcgtaaattaatgtctgctctccccgtggatgacgtctgggggattggacggcggatcagcaaaaaactggacgcgatggggatcaaaaccgttctcgatttggcggatacagatatccggtttatccgtaaacattttaatgtcgtgctcgaaagaacggtgcgtgaactgcgcggcgaaccctgtttgcaactggaagagtttgcaccgacgaagcaggaaattatctgttcccgcagctttggtgaacgcatcacggattatccgagcatgcggcaggccatttgtagttacgctgcccgggcggcggaaaaacttcgcagcgagcatcaatattgtcggtttatctccacgtttattaagacgagtccatttgcgctcaatgaaccttattacggcaatagcgcgagcgtaaaactgctgacgcccactcaggacagcagggatatcattaacgctgctacgcgatctctggatgccatctggcaagcgggccatcgttaccaaaaagcgggcgtgatgctgggggatttcttcagtcagggagtcgcgcagctcaatttattcgatgacaacgcaccgcgccccgggagtgagcaattgatgacggtaatggatacactgaatgctaaagagggcagaggaacactctattttgccgggcaggggatccagcaacaatggcagatgaagcgagccatgcttagtccacgttatacaacgcgaagttctgatttactgagggtcaaataaatatagcggcaggaaaaaagcgctcccgcaggagcgccgaatggattagcgaccgaacagatcacgttttttcgctttaaacggctgggaaatcaccaccagcactgcgacaatcaggtaagcgataaaaataccgagcagccactgcggcatttccagacctaaaaaatcccactgacgctcggcgcaatcgccagaggcgacaaacacttgcggcacccacttatccagcggcagccattccgggaaacgaaccataaaatcacaggtggcaaacgggctaggatagagctgaagcatggtgtgctcgtaagttaactgcacaccgcggaacgcactatacaaccagataaccatcgctacataacgcagcggagttttcggggcgatcgcgccaatcagcgcagcacccagaacgccgaataacgcgcagcgttcataaatacagagcacgcaaggtttcagtaacatcacatgctggaaccacagcgccgtcagttccagtgccagagcagtaaacgccatcaacagccacgcgccccggccttgactacattggttcaaaaatcgcaacataatcatttccctgcaatatgcatagagtgcgcagtttaaaccaattcattcgctgcgccaccaggaggcagcaaaaataggacgcaattggacaattatcgggcgaaaaggcaaaccgggcatttgtatgcccggtaagttgttatcaaagcgttgctatccagcccatttgcataaaccattcggttacaggggcaagcgtaaactcgacgcagagcaagccgacgagtgtcaggacgagggtgtaaggcagggccatccacaccatgcggccataagagaggcgaatcaatggcgcgagtgcagaggtcagcaggaacaggaacgcagcctgaccgttcggcgtagcgacggagggcagattggtaccggtattaatggcgaccgccagcagctcgtattgcttcaacgtgatagcgccactttccattgccgctttcgcttcgttgatataaatcgtccccacgaagacgttatcgctaatggaactcagcagaccgttgaaaatatagaacaggctcagctgagcatgttcgcttgcctgcaacacaaactgaataattgggctaaacagttgttggtcgataatcaccgcgactacgctgaaaaacaccgtcaacagtgcggtgaatggcagagattcggtgaaggctttaccgatagcatgctcatcggtgacaccggtcaaacttgttgccagaataatgacactcaaaccaatcaagccaacttccgccagatgcaacgccagcgcagtcaccagccagacgccaataatcgcctggacaatcagacggattttatcctgacgggtacgctggtggcggctttgatcgtcaaactgttgcaacacttcgcggactttctccggcagcgtttcaccgtagccaaaccaacgcagcttctctaccagcaggcaggttaacaggccacaaatcagaaccggaacggtcaccgggctcatgcgcaggaagaaatcgccaaaatgccagccagccgctttagcgatgatcaggttctgtggttcgcccaccatggtcattacgccgcctaatgcggtgccgacaccggcatgcatcatcaggctacgcagaaagccacggaactgttccagaaccactttgtaatgcttgtcgatatgactatcgtcttgcaggtcggtgtcttcggtacgggaagaggctacgcggtgataaataccataaaaaccgactgcaacgctgatcaccaccgccacgacggttaaggcatcgaggaacgcggagaggaacgcagccgccacgcaaaaagagaggctcagcagcattttggagcgaatgcttaacagcaaacgggtaaatatgaacagcaacagctgtttcataaaatagatacccgccaccataaacatcagtaacagcaagacttcaagatttgccgccacctcttcacggacgtgttccgcgctggtcatgccgatgaataccgcttcgatagccaacagaccaccggggagcagcgggtagcatttcagggccatcgccagagtgaaaataaattccgctaccagcaaccagcccgcgacgaaagggctgatgaggaaaattaacgggtttacgattaagaaaatgatgagggcgagtttgtaccagtcgggggactggcccaaaaaattgcgccatagcgcgcggccccaggagatctccatgatggtttcccttaccttacaaataatcaatgatgtttttatgtttaaacgcaaagcttaacggtcaggcaggagtgaggcaagtcttgatagtcaaggggaaagagatgcggaaaatgaagccttgatccctttttcttctttttgtctgctatcagcgtagttagccctctggtatgatgagtccaactttgttttgctgtgttatggaaatctcactatggtcattaaggcgcaaagcccggcgggtttcgcggaagagtacattattgaaagtatctggaataaccgcttccctcccgggactattttgcccgcagaacgtgaacttagtgaattaattggcgtaacgcgtactacgttacgtgaagtgttacagcgtctggcacgagatggctggttgaccattcaacatggtaagccgacgaaggtgaataatttctgggaaacttccggtttaaatatccttgaaacactggcgcgactggatcacgaaagtgtgccgcagcttattgataatttgctgagcgtgcgtaccaatatttccactatttttattcgcaccgcgtttcgtcagcatcccgataaagcgcaggaagtgctggctaccgctaatgaagtggccgatcacgccgatgcctttgccgagctggattacaacatattccgcggcctggcgtttgcttccggcaacccgatttacggtctgattcttaacgggatgaaagggctgtatacgcgtattggtcgtcactatttcgccaatccggaagcgcgcagtctggcgctgggcttctaccacaaactgagcgcgttgtgcagtgaaggcgcgcacgatcaggtgtacgaaacagtgcgtcgctatgggcatgagagtggcgagatttggcaccggatgcagaaaaatctgccgggtgatttagccattcaggggcgataatcccttccgtttaaagagcaaacccctcaaacgaggggttttttgttgtttttacagatttcccattcttggcgggcaacgttccagcaactcgatgctgccgtcttcgttttgctgttcgagcatcacatcaaatccccacaggcgatgcacatgcttcaggacttctttgcgcccccgatccagcggtgcgcgattatgtggaatataacgcagcgtcaggctacggtcgccgcgcaaatccacgttccagatctgaatattcggctccagattacttaagttatattggctgcttaaccggttacggatctcccgataaccttcttcattatgaatagcggaaatctccagataattatgccgatcgtcatccagcacggtgaagaagcggaaatcacgcatcactttcggactcaggaactggctgataaaactctcatctttgaaatcacgcatcgcgaaatgcagcgtttccagccagtcggaaccggcgatatccgggaaccagtatttgtcttcttccgttgggctctgacaaatccgtttaatatcctggaacatggcgaacccgagggcatacgggttgatgccgctgtaccacgggctgttataggggggctggaagaccacattggtgtggctgtgcaaaaactccagcataaaacgttccgttactttcccttcatcatacagatggttaaggatggtgtagtgccagaaggtcgcccagccttcgttcatcacctgagtctgtttttgcggataaaaatactggctcaccttacgcacaatacgcaggatttcacgctgccaactttccagcagtggcgcatttttctccataaaatagagcaggttttcttgtggttcggacggatagcggcgcgcttcagcaaccgttttctcttcctcgcgcttcggcagggtacgccagagcatattgacctgactttgcagatactcttcgcgacttttctgccgggctttctcttcttgcaggctgattttttgcgggcgtttgtaccggtccacgccgtagttcatcagcgcgtggcagctgtccagaagccgttctacttcatcaacgccataacgctcttcgcactcggtaatatatttacgggcaaaaatcagataatcgacaatgctactggcgtcggtccagctacggaataagtaattgtttttgaagaaagagttatgcccatagcaggcatgagccatcaccagcgcttgcatggtaatggtgttctcttccatcaggtaagcgatacacgggttagagttaatgacgatttcataggccagtccttgctgaccgtgcttatacagccgttcagtctcgataaactttttaccgaaactccagtgcggatagttaattggcatgccgacgctggagtaggcatccatcatctgttcactggttatcacttcaatctggtgcgggtaggtatccagccggtagagtttcgccacccggtctatctctgccagataaacatccagcaggtcgaacgtccagtcgggtccatcgctcaaacgtgtggtgtccttattcatagaatcgatcgtcgccatacgcgcacctcattgttgtcggcgctctctgtgtggagcacctcatttcaagcatagaacacctgttaaaaaccgcgtcgccggagaatttttttctttgcgatttcttattatcagagtgccactaatccgcttctgaacggaattttatgctggataaaaagggcgttcagcaggagatactaaagacgccatattgccgcagagtcagggagatgtgagccagctcaccataaaaaagccgcatgttgaataatattttcaactgagttatcaagatgtgattagattattattcttttactgtatctaccgttatcggagtggctatgcgagttgtcatactgggaagtggtgtggtaggcgttgccagcgcctggtacttaaatcaggcaggacatgaggtcaccgtcattgatcgggagccgggggccgccctggaaaccagtgccgcgaatgccgggcaaatctcccccggatatgctgcaccgtgggcggcaccaggtgtgcctttaaaagcgattaaatggatgttccagcgccatgcgccgctggcggttcgtctcgacggtacgcagttccagttgaaatggatgtggcaaatgttacgtaactgcgacaccagccactacatggaaaacaaagggcggatggtgcgtctggcggaatacagccgtgattgcctgaaagcattgcgcgccgaaaccaatattcagtatgaagggcgtcagggtgggacgctgcaactgttccgtaccgaacaacagtatgaaaatgcgacccgcgatatcgccgtgctggaagatgccggcgtaccgtatcagctgctggaatccagccgcctggcggaagtggagcccgcgctggcagaagtggcgcacaaactgacgggcggcctgcagttacccaatgatgaaaccggagactgtcagctatttacccagaatctggcgcggatggcggagcaggcgggggttaaattccgctttaatacgcccgttgaccaactgctttgcgacggcgagcaaatctacggcgtgaagtgtggcgatgaagtgattaaggccgatgcgtatgtgatggcgtttggttcttacagcacggcgatgctcaaaggcattgttgatattccggtgtatccgctgaaaggctacagcctgaccattccaattgcgcaggaagatggtgcgccggtatccaccattcttgatgaaacctacaaaatcgccattacccgtttcgataaccgcattcgtgttggcggaatggcggagattgttggttttaataccgagctgttgcaaccgcgtcgtgaaacgctggagatggtggttcgcgatctctatccacgcggcggtcatgtcgagcaggcgactttctggactggtctgcgcccgatgacgccagacggcacgccggttgtcgggcgtacacgctttaaaaatctgtggctgaataccggtcacggcacgctcggctggacgatggcttgcggttccggtcagttgttaagcgatctgctctctggtcgcacgccagcgatcccatatgaggatctaagcgtagcgcgctacagccgtggatttacgccaagtcgtccgggccatttacatggcgcacacagctaaggaaacgagatgacccgtccgatacaggccagcctcgatctgcaggcattaaaacagaatctgtccattgtccgccaggccgcgacgcacgcgcgcgtctggagcgtggtaaaagcgaacgcttacgggcatggtattgagcgtatctggagcgcgatcggggccaccgatggctttgcattgcttaacctggaagaggcaataacgttacgtgagcgcggctggaaaggaccgatcctgatgctggaaggatttttccatgctcaggatctggagatttatgaccagcaccgcctgaccacctgcgtacacagcaactggcagctcaaagcactgcaaaatgcgcggctaaaagcaccgttggatatttatcttaaagtgaacagtgggatgaatcggttgggcttccagcccgatcgcgtgcttaccgtctggcagcagttgcgggcaatggcgaatgttggcgaaatgaccctgatgagccattttgccgaagcggaacatcctgatggaatttccggcgcgatggcgcgtattgagcaggcggcggaggggctggagtgtcggcgtagcttgtccaatagcgcggcgactctgtggcacccggaagcgcattttgactgggttcggcctggcattattttgtatggcgctagcccgtccggtcagtggcgtgatatcgccaataccggattacgtccggtgatgacgctaagcagtgagattattggtgtccagacgctaaaagcgggcgagcgtgtgggctacggcggtcgctatactgcgcgcgatgaacagcgaatcggcattgtcgccgcagggtacgccgacggttatccgcgccacgcgcctaccggtacccctgttttagtggacggcgtgcgcaccatgacggtggggaccgtcagcatggatatgctagcggtcgatttaacgccttgcccgcaggcgggtattggtacgccggttgagctgtggggcaaggagatcaaaattgatgatgtcgccgccgctgccggaacggtgggctatgagttgatgtgcgcgctggcgctacgcgtcccggttgtgacggtgtaacttgttgtaagccggatcggaggcaacgtcttctgggtgcaaaaaaatcatccatccggctggtcagcaactgtagttgttaatgtgacagagccattgcccatgatagtgtccattaaaaggatggacactatttccccggaacctgaactcaccgcacaggcgttctacataaaacgcttacgcttcattgttgactcgaactcgacttcagataaatcacgctttacccttgatggagcctgtacatagatttgtgtaattgcctgattttgatatgttcaattcaacatcaaatgaaggttaaattatggacgacaaacaattgcaggctcaggctgcgttcagcaaagcatcgcaaccggcgatagatgcttcattaaatttaagattcagcttcctcttcagccacccgtacgccaatcttcaacacttcattatcttctttctcggccaccgtccagatcatcccggcaaactctacctggtcaccgacaaccggtgccgcgcctaacaactgctggacaatttcacccagcgtttgctgcttatcacgatattctcgcccgtcttccaggccatatatcagcgcaacatcagcatatttggcgctggcttcgagaatgaagtcaccaaagaagcgttgatccagcgcgaccggcgggctctggctgaacagtttaccgagcgccggaagatcgcgttcccgaccaattacacacaacacatcgccttcgcgcagtcgggtgctgccggtaggatgaagcaactggttatcacgaaacagtgccgcaatacgcgtctcttttggcatatgcaaatcgcgcagtgccgcgcccacgcaccatttatcggcactcaattgataaacaaactgctcccacggattttccggatgaatatccaggccaacgcgactcaccggacgtcccactggcggaaccaccactttggcttttttagccgcccagctgagacttgttccctgcaagagcagactaaccagaaccacaaagaaggcgacattaaagaacagacgtgcattctccagccccgccatcatcgggaacacggccaggatgattggcaccgcgccgcgtaatcctacccagctgataaacacgcgctcacgcagattgaaaccgcggaaggggagcaatccagcaaatacgctaaggggacgggcgaagaatatcatccatgcggacaaaatgagcgccggaatggcaataggcagcagatcgcttgggttaaccaacagccccagcaccaggaacatggcgatttgcgccagccaggcgaggccgtcgaaattttgcaggatgccgtagcggttgcgaatagggcgattacccagcagaaaaccgcacagatacaccgccagaataccgctaccttccagcgcagtagttaaactgaaaatcagaataccgccacttaatgccagcaatggatataatccggcgggcagggcgatgcggttgatcatttgcagtagtaaataaccgccgccaagacctattacaatgcccagaccaaattgttgcagaatatcgacaatgaacatccagctaatattgctctcatgatgctggatcatcgcaattagggtaatcgtcagaaagaccgccattggatcattactgccggattcaatttccagcgtgctgccaacacgttcgttaagccccttaccacccagcagagaaaagaccgctgcagcatcggtagagccgacgatagcgccgattaataagccttcaatcaaatcaagattaaacagccacgccgccatcatgccggttaaaccagaggtgataagcacgcccagcgtcgccaggctcagtgccggtcctaacgccacacgaaaggaactggcctgagtgcgcatcccgccgtcgagcaaaataatcgccagtgccaggttacttaccatgtaggcgaaggggtaattatcaaacgggataccgccgacgccatcgactcctgccagcatgccgatcgccagaaaaataaccagaataggaatgccaagacgggaagaaaaactactaagtaatatactgctggtgacaaggatggatcctaagatgaaaaggctaattattgttgtggcatccaacggtcggttactcctgattacgctgtctcttatataaaccctaccatattagcggcagagacagcgttttacttagccctgaagcgtgatttttttacattttaagaacaggatgaccgctaatcgtcaactgagtgccttcccgggtgttattcagaatggcatgtgcgcccaacggcagcgtaaccgtgcgttgttcatgaccaaaatcgaggccggtaatgagtggaatgctcaggcgggaacgcaaaaacgcgtacacactctccaggttgtaacctgcgtcataatcattgggcgtgctgccgctaaagctaccgagaataatcgccttctgacgtggcaaaattcccgcatgatagagctgcaacagcatacgttcgacccggaaagggtgctcgttaatatcttccagcaccagaataccgttctcaatttttggcatccacggtgtaccgatcagactaatcagcatcgcaagattgcctccccacaacgtgccttcggcccgacatgtcgggccttccccttgccattcaatggtgaaggtttcattgcgtaacgccagccagaaatggtgctcggtaaaggcgttcagttcatccgcgccaaagtttgctaccagcatggggccgctaaaggtgatgacattgccatgcgccagaagaccgcactgaatggcggtaaaatcgctatgtccgcaaatgagcaacgggtcatgttgttggcgagccaccagtgcctgccagtcaatatctgccagtaaacgactggcaccgtaaccgccgcgtacagccagcacgatggtgttgggggtagtcagtctggcaagggaattgagatcttccagacgctctgtttccgtacccgcaaaacgctcacaacgacgggcaataacctcgacgttattgacttgatgccccgcgtcggtaaggcgctggataccacgcagcgcggcgtgctgtttaatgcagtaaccgcttggggcaattaagtgaaacagagacatggcaattccttgctgacaacagaaacgaaatgtatatcatgccgcttaggtgtgccgttgtcacctcaacggcgattccaggctataaggatagaagaagtgaaattgagatggtttgcctttttgattgtgttattagcgggttgtagtagtaagcatgactatacgaacccgccgtggaacgcgaaagttccggtgcaacgtgcgatgcagtggatgccaataagccagaaagccggtgcagcctggggcgtcgatccacaattgatcacggcgattatcgctatcgaaagcggtggtaatccgaacgcggtgagtaaaagcaatgccattggtttgatgcagttaaaagctagtacctccggacgtgatgtttatcgccgtatgggctggagtggtgagccgacgaccagcgagctgaaaaatccagagcgtaatattagtatgggggcggcttacctgaatattctggaaaccggcccgctggcaggcattgaagatccgaaggtactgcaatatgcgctggtggtgagttacgctaacggggcaggtgcgctgctacggactttcagcagtgatcggaaaaaggcgatcagcaaaatcaacgatttggatgctgacgagttcctcgaacacgtagcgcgaaatcaccctgcgccgcaggctccgcgctatatctacaaacttgagcaggcactggacgcgatgtaaatcagtcgcgcactttgtccgctttttcccgggcttctcgctcgagagagaaaataatccgctgtaattgccgctccaccgtcgggctgacgttaagaaaacggaagctcagacggggagtggtgatggtttcattcttgccatcaatcactttgcgctcgctgatggagattaactgggcgtcaaagtgaaaaacaccccattgccccatgttgacttcaatctgagcgaagcgcatgccttcttgtaattcggcaggctttgctgtttccagtaatgcgcccatgccgcctaagctcaaatcatacaggcggaaacgtaacgtactgttatccgccagtttggtctggcaaaaataaggcggatggagtggggcggagatgcggaaatatcggcgtcgttgtacaaaccataaggtgggaggcggtacggtaataaatgccggaagctgcaagtattcactctgctgtagttgttcaacagtaaactcgactttcgcaccctgagtttcggcggtaatggtaatgtgctgtgcctttagcacggcgatgttgtcttcggcttgactgccgaaatccagcaccagtttatccggggttattgccagtaatttgctgatcagctgcccgccattccaactgagacgcaaaggaattgcggctttgtgcaaatcgcgtaacacgcccaggacggctaacggattttgtttcaggaactgctcatggtaatgactcacgcggaaaaactcctgactgacaaactgtctttggtttatcggtcacagttaacaaaacttaatacaaatgcgtgaatattttttacatgttgttcttaaatcagccgacatacgcccagcatcgatcccgcccttgcctatacttagagcgttgatgtaagcatttcttgcgtccgattcatcgaaacgagggcctgaacatgggaattattgcctggattatttttgacctgatagccggcattatcgccaagctaatcatgccggggcgtgatggtggtggatttttcctgacctgtattctcgggatagtcggtgcggtggtcggcggctggctggcgaccatgtttggcattggcggctccatcagtggttttaatctgcacagcttcctggtggcggtggtgggagctattctcgttctgggcatattccgcctcctgcgaagagaataagattttcataaggcggatagcgatacagatgccgctatccgctttcacatcagaacgtatactcgacacctgctttacgggtgaaaaaaatcaatatagcacttcgatatccgataaagtcggttcccggtaacaacaacagaatccttttttaattattgtttcgttgtttttggtgtgattcagaaaataaatattttagacagtagccagagtggcgttaaaaatggggcggatagtgaggcggttttggctgcgcttattgaacatttagaattgatcaatccttctggcagattaagccaaaatacccgtagcgcaatgcttcagttacgcgaagaggaatggtctgaattctttttttggttgctaaattctctggagtgtctggattatgtgattattaatttaactccagaaagcaaaaaaacgttgatgagtgaacaccgtaacaatattcaggtagcaattgatgctttatatagccaacgtcggcgtaaaagcccgggtgatgaaagtgaaacacttacccgtagaaatgacgctatcttcggcaaccacgtatggcaaacatttgcgcaatacttcccgccaggacttgaaaaaccgtctgtgtaaaaaaaaccatagctatggtgttatctgccgacaacgccatccggagaagccgaatgacgttgtcggagtaagcgctggttaaggtgtgggttgtgcctctttggtactgggttgcgtcgttgcactcttaacggtcggacgcgtcgccggaacattgtcacacggttgctctttcgggcagatcaaatccagcattttcagcgtcacgccattggtccagccaaagccatcctgtaatggatattcgccaccgccgccccccgttccggtggtgctgacatcatatttttccaccagctttttctcccggtcataggtgtgctgaacattggtcaggaagtgccagctaatgtccatcgccacctctttttgcccgtagttttgtaatccttctgtcgcgacccactgtaacggtgcccagccatttggcgcatcccattgttgcccacttttcacgctcgtggtgttcaggccgccgggttgcagcagatgtgttttcgtcgccgtcgccattttgttggcgcgatctttcgctgccgcattgacgtacagcgggaacagggcggccgcggttaactgattgcgcactttatgacttttcaggtcgtaatcggcataccagccttgttgatcgttccacaggtatttttcgatccctttttgacgggcatttgccagcgtttcgtactggtttgccatcgcgttatctccggcagctttgctggcgcgggcgaggattttttccattttaaacatcaggctgttcagatcgaccggtacgatgctggtggtgcgtaaggtatttaactgctgcgggttgtccatccagcggctgctgaaatcccagccagacgcagcggcagagcgcaggtcgcggtaaatttcagtggcaggtcgattcggattgcttttggcggtggcaatatcttccacccaactctctggtcgtggcgtatcgcgatcgtcccagtagcggttgagaagggtaccatcctgaagtttgacaacgcgtttttcctgttgtccggcttgcaggttttcaacaccgtccatccagtaagcatattctttttgcatttgcggcaggtattgcttcaacgcggcatcgccttcatgctgcgccagtaactctaccatcagggcaaagaagggcggttggctgcggcttaaatagtaactgcggttgccgttgggaatatgaccgtaagtgtctatttcatgagcaaaattggccaccatatccgcgactttatcccagtgaccgctttcggcaagtcctaacatggtgaagtaactgtcccagtaatatacctcgcgaaagcgtccgcccggcacgacataaggttccggcagcggtaacagagaatcccatttttcggtgttttcggtagaacgcgttaataccggccaaagtccgtcaatatgttcgcgcagactctgcccctctggcggaacatatttctcgccttctttcggcagggtgaaattgacgttaacgaaatggcgcagatcaaatccgctctggttttgctgcatccgataatcagcaaggatcatcagcggatcgctgttcggcacggcatcggcaaaggttttttggtccggaaaaagtttggcgttttgcacatcattaaacagcggccctaataaaatatcaggcggctgtggtgttaccggtgtttcttctgcctgcacgcttagcgcagcgaaacacaaaaagatacaggctggaattaacgccattttttgcgggcgagaaggtgcgggggatttcatcaatcattctcctttggcgaaaccgaataaaacggtattcaagtatcagaaaaccttagttcaggatcgcactagctgcatgatcgaaatctcattctgcgaactgtcaggcattttagaaaagggaattaaagggataaataacggcgaaatagagtgatcaaataacgtctgtttattagccagccagcggcgttgggttcgtgattagcgaagaaaaatcatcataaattggtgaaaaatataacaggtagttaaaaaccattagtgctgagtaaattgccggatgacatcagaacgatgccatccgaacagtggcttaaccctgacggttgaaacgttgcgttttaacgtccagcgttagcgtttcttctggttgtatcgcatacagtttctcaccctgctggcaaatccagccaatccccagttcacgggcgattagggcgctgtgggataccggacttccggcgctaaggcagataccttttacaaccgccggatccagttgcagtactgtggaaggataaatgttctccgccagtagaatagttgggctgttaaactgcgggagttcttctttcgtttgggtcaggtggaccagggtgcgatgcagaagatcgtccacatcaatatagcgagcttgtagatattcatcatccagttgctggtattgctggctaagttctttaagaacttgctgccaggcatattctgccgtgcaatgttcatgctgaaggagttcgcttgccgccgccagcagttccggatcatctaacagtgtatggtgaccagaaaagattgcggcaatatcgtcaagcccgctggcttctgctttcgctgttaacgtcatcagatctaataacgtgaagtcaatagcctggcgtaatcgatcttgttcttcttccacggtcagggtactttttgcctgtaccgtacataaaactggttgataataaaaggctttaccgctaacaggcggaacgggacgcagagtaggtggagcgacttcctccgtttcaccaaagttatcttcagccagctgacggaaagcgatcagtgcctcttcagcttctggccctttcgcaatcaggcgcagcgtatcgttatagcgaacttgtagtaacgcaatctggttaatactctctggtgtgacgcatttgccgtttttttccagcaacatatcggcattaaatgtgcttaaggtataaaccagccgggaggccggacgtacatgcaggccgttacggttttttatgaccaccgccagagaacgggcttcttcatcgtacgcaggacatgtgtcagagatttcagtgtcggaggacggtaaacccagttgttcacgtttggcttccagcgcatgcatggcgtcaaagataactttgtcgatatccgccccgctggccgcgctgaccgttgctgccagtgtaccttcgaccaacggcgcagcacacaaacgtacttttgcggcgatctcgggagccagcaattccagcgcagtttcagcactcaataatgcgctacccatatccatcatgaccagcacatggtcggcatcagcaacagattcgatggcctccatcactttgacggcatcggtaccaatgggattttgtggatcgtcaattcccgcggcaatggcgattttacaactatcactcattaacatctgacgggctaattcaccgacaccttctcccagtcggctgctatgactaactatgaccaggtttaccatcaccaattccttactcttttgcggctaacgccaacatttgcatcataaacatcacgctggtcgcgccgggatcctggtgaccaatactgcgttcaccgagataactggcgcggcctttgcgggcttgcatcgtaatcgtactttgtgcagcggattcggcgatgctactggcagcttcgagcgccaccggaacagagagattttgctcgctggactgacgtaagctttccaccaccggcacccacacatcacacatggttttatcgccaggttcggctttcccgcgactgattacgccgtccgcgccatcgcggaacatctgataaagctcttccagtgtcaggctttgccgtgcctgggtcgcctgtgcggcgcggataaagaaggtaccgaacagcggaccactggcaccaccgacgctggaaagcagcgtcataccggtattcttgagaatgaaaccgatatctttatctgcgatagcagggagtttttccaccactttgctaaagcctcggttcatatttagcccgtggtcagcatcgccaatttcgcgatccagtccggtaagatactcgctctcggtgctgaaaatatcgccacaacgagtgagccagttaacaatttgagttctgctcagactcattgctttctccttatttaccccagttaagggccggggtgtggaccggggcgtcccagagtgccagcgtttcgtcatcaactttcagtaaggtgatactgaaaccggtcatatccagactggtgcagtacgcgccaattaaattacgttcgatagtcaatcccgcttgctggcaacgtgtggtcaggcggttatagacgccgtacagctcagaaagcggagttgcgccaagattgttaaccagcgcaatcacccgatcgccagactggagcggttgtttggtttgttgttcttcctgccaactgccttgttgataatcccagaaacgcaaagtgcgatggtaactgccatttaccagcagggtgtcgaacatttcatcgacggtttgatcaagggaagagaaggggcggcggtcaatacccggctcaccatgaatgccgacgccaaactccatctcattatccgccagggtaaaagaaggtttgcccgcggcaggaacggtacaggcaccgagagcgatacctatactgtggccttgattattcagcttacgccccagttccgcacaggcgtccagactgtcgccacgctccgccgctgcgcctacgagtttttcaattaatacggtgttggcaacgccgcgtcgcccggcagtataaagactgtcttttaccgcaacgtcgtcatcaatgaccacagtggtcacttttacgccgctatcgtgcagtaactcggtcgctgtttcaaagttaagaatatcgccggtgtaatttttgataatcaacagtacaccttcgccgccatcaacttgcatggcgcattcaaagattttatcgggcgtcggactggtgaaaatttcgcccggacaggccccgctaagcatcccctgaccgatataaccacagtgcatcggctcgtgtccgctgccgccaccgctcagcagggcgacttttcctgcaacaggggcatcagctcgggtgacatacaccggatcctgatgcagtgtcaggcttggatgcgctttcgccagtcctgccagttgttcgtccagtacgtcttgcacatcattgatcaattttttcattattttgctccagcaattacggtagggcatggatgatgttcaacgacacggcgaccactgactgccgatgaatccattgtgcatcaggcaagggaaaagaaaattagcccaaattatgtttcatagtgaaacatatgctttaatgaatgttccatattgaaacttttacgtgtattaatacttaaaattgcgagccggaacaccttttgtcataagggatgcgggatatgagtggcgcttttaacaacgatggtcggggcatatctcccttaattgcaacctcctgggagcgatgcaataagctgatgaaacgggagacatggaacgtaccacatcaggcccagggcgtgacatttgcttctatttatcggcgtaagaaagcgatgctgacgctcgggcaggctgcgctggaagatgcctgggaatatatggcaccgcgagagtgtgcgctgtttatcctcgatgaaaccgcctgcattctcagccgtaatggcgatccgcaaaccttgcagcagctaagtgcactgggattcaatgacggcacgtattgcgccgagggaattattggtacttgtgcgctaagcttagcggctatctctggtcaggccgtgaaaacgatggccgatcaacatttcaaacaggtactctggaactgggccttttgtgcaacgccgttgtttgacagcaagggccgattgacgggaacaatagcgctggcgtgtccggttgagcaaactaccgcagctgatttgccgttgacgttggcaatcgcccgcgaggtcggaaatttactgctgacggacagtttgctcgctgaaactaaccgtcatttaaatcaacttaatgccctgttagaaagtatggatgatggcgtgattagctgggacgagcagggtaatttgcaatttattaatgcccaggcggcgcgggtcttgcgccttgacgcgacggcaagtcagggacgggcaatcactgaactcttaacgttacccgccgtattgcaacaagcaataaaacaggcacatccgctcaaacacgtagaagcaacctttgaaagccagcaccagtttattgatgcggtgataacccttaaaccgataatagaaacgcagggaaccagctttattttgttgctccatcctgtggaacagatgcggcagttgatgaccagtcaattaggaaaagtcagccataccttcgctcatatgccacaggacgatccgcaaacccgccgcttgattcattttggtcgccaggcggcgcgcagtagctttcctgtcctgctttgtggagaagagggcgtgggcaaggcactgctaagtcaggcaattcataatgaaagcgagcgtgctgcaggtccttatatcgccgtcaattgtgagttatatggtgatgctgcgctggcggaagaatttattggtggcgatcgcacggacaatgaaaatggccgtctgagtcggctggaactggcacacggcggcacgctgtttcttgaaaagattgaatatctggcggtggagttacagtctgctttgcttcaggttatcaagcagggggttatcacgcgactggatgcgcggcgtttaataccaattgatgtcaaagtgattgcaacaacgaccgcggacctcgcaatgctggtggaacaaaatcgttttagtcgccagctgtattacgcgctgcatgcatttgaaattaccatcccgcctctgcgtatgcggcgtggcagcattccggcgctggtgaataacaaattacgcagtcttgaaaaacgcttctctacgcggctgaaaattgatgacgatgccctcgctcgcctggtttcttgtgcatggccaggcaacgattttgaactttacagcgtcatcgagaatcttgctctgagtagtgataacgggcgcattcgcgtcagtgatttgccggaacatctgtttaccgagcaggcgacagatgatgtcagcgccacccgcctttccaccagtctgagttttgcggaagttgaaaaagaggcaattattaacgcagcccaggtcacaggcggtcgcattcaggaaatgagcgctttacttgggatcggccgcactacgctgtggcggaaaatgaagcaacatggcattgatgcagggcagtttaagcgccgggtatgaaagacagaaacgatttctgatacatcagagtgatctgtatttcattccggcgcacgctaacaattttcagcatcgtttaagggcttgtctatcccgcacttaaaagctgaagcgatatcctccgttgacttgcttctgatcaaagaggttaccctgcgtgtaatccgcttcgagatagaatgtgtgctgtttgttatactgtgcactgactcccacgccgttattccagccattacctttgaaactgtacttctcccgggagttgttcaacagatattcggtatccccactaaactcgcggatagcgccagtcttcacatagacattcagctggctgttgcctgcggtgatgtcataccccagtatcatgctggcacgccccagcaggctttcgtagtgattcagatgtatattgaggccattactcgccttcatagtcatctcattctggtggctgtatgtaagctgggtttgcggctctatatagaacccataaccagtaggggacaggttgaacctctgcccggcttccagggagatgctcattccattcgcagtgccgttggcgttaacgccgttgttctgactgtccagtacgtggaaactatttttctggcggcttgcttttataacgagatcgctgtaaaaaccgttttgtgccatgtaactggcgtacattcccatgtagtcactacgtgcggtaccgtcgcctccgctatagtccgggcttgcatgtgtactgccaatatacagaccgacatacaacggcattacatcagagagacgtttatccccaccaaactggataccgctgtaacccatgtcaaagccgctcagtttgccactggcaaaggagtccaggcttcccccataactgcgcaaccagatattaccgtctttactctgatttcgcaggtcacccatccgttgcatcagcgtacggttttcaacatagttcaataagtaaccgacattgagataattgccgccagcatctgcggtcgtggtgggtttaggcgtgggagcgggttcaggcgtaggatcggggttgactatgggaggctgagcgggagctggtgtgggttcaggattaggagtcggttccggaactgtcccggaagcgtaaagctcccagttagtgccatttttacgcacatcgtacagatatccccccaactcaacctgagaagacgcgctgaagctggccgcgccgtcagtggtttttaccactgtcagaacttcatttcccgttgtggcctcgctgccctggttgcggatagccaatacgtgattaccagcactactcccgctgatattcaataaatcccctttattattaacgccattaccctcgccaacaacatcagcacgcataataaaggtactgttaccgctcaggttctctacgtttaatgtggcaaatgtgccggcagtactcccgtggctggcaaaatcgacagtactatggctcagcgccagcgtgtcgagattagaattacttgttacgttccagacgctgttattcattgcaacgtccagttttccgccattgacattatcgctgagggaggaacctgtccaaacgttcccagggtgcatatccagattgattagcccacctttggaaagaacgctaccgttgataagcatacgaccgctggcgttgatgcggctggcggcataaccatcgtcatgttgcgttgcgatggccatctggtcgggtgtactcatatcaatgaccagatcgctcgtgaggtcgatctggctgttggtcatggcataaattcccctggctcctgccgcgccggtgatagccaaactgtctccggttattctaccgccgctgagagcccacaaacccagcgccagactgccattacgatcaactgtaatatcggtattttgcatgttgacaacagccgttgccgtctgggcgctggcaccataagaaccgccggaaaagatgctgtttcgttgcgctgccgtgccagtaaaattgattatcgcgtcactaccactggtgacgaggccaccgccctgcgcggaagaaatatggctatctgcaccgatagtggttgtaccaccacgaacttcgacgccattggccgcggctccagttacatcaacagtgagtgcattcgcgctaacctggccaaagctccagaggccgtgagcattatcgccattggttttaatggtactgtttgttccgagatcgacaacagagtttttctgtacgtttatccccatggcgctgtagccctgaacatcgattgtcaggtctgtagccgtaaaacgcgcagcaccattggcgttattgccgttgagaccaccgatataaacacctgtacttccatcggtcgtgattttacttccgcttccaagatcgacactggtgccatagtcattgatggttaggcctataccgttgctgttttcaatggtgaattgagtggctgttagtgtactgctatgcccaataatgatgccgtcatcgttactcttaatggtgctgcctgtgcctaagtcagcatgggtatagtcaccaattaagttaatgccgatggcagaggtttgaccaacaacatctactgtgagtcggttagctgtcagggagctgtttttgccctgaataatgattccttttgcatatccagaggcgtcgttgacattgacggtgacatcattacccaggttgatattgccaggcgtgtttcctgctggggtcattacaccatagaggtttccacttggatcggcggtatctcctgtaattctgtcaccatcattaatagtaatattggtgccatattgacttcctgtatcagcagctatcagcaggggggaaaagataattgcattcaaaccaatagcgccaaattttatcagttgaatactggggctacggatttttaattcagcgagacgatctgctttggtattcccattgtgttgtttgatgcccataccactcctatatagtacccagactatgggtctatggattttgtcattttgtttaaatcaatgaataatatcctcttatcatcatgatatttgtatggtgcaatcatgatgagcttctcagagaataattctctattaccgggcaaaatcaggaacacaggaattaatatatatttaacatcccccttacaaaggtgagtttatatcgagttattccctaagttgtcgttacttattccaattcgttactataaatatggcaaaaatattacaacaaacagcggttaaaaaatttggtgaagattttttgtaataatcctaattagttatgggaatttcgcttgatgtatctgcataacaaaaacaatatgcgccatttttgcattactaataagaaaaagcaaaaaacatcgatattcatttttggtcaatgggttttctggcctatcgttgttattgtgctactggttatcattttcatcttgccagcatattggagcgtgatcaattttgatcagctgtgaagggggctgatgtgtagtgatacaaaaacttacgttatatcactgctaatgagatatccggcatctgaacacttatgtctttaattattctcgtggttcactataggcaataagcacaaaagtgtaggatgttacaagaatgattaggactcggtgaaatgaaaaatccacgcaattgcgtggattttatatacttttgcgctcttcatgagatttagcgaaacctcatgagacaataaattaattagacgttgaaaaggaagttcatcacatcgccatctttcacgatgtaatctttaccttctgcacgcattttgcctgcttctttcgcgccttgttcacctttgtaagtgatgaaatcttcaaagctgatggtttgtgcacggataaagcctttttcaaaatcagtatggattttgcccgctgcctgcggcgcggttgctccaaccggaatggtccatgcacgcacttctttcaccccagcggtgaagtaagtttgcaggttcagcagtttataaccggcacggatcacacggttcaggcccggctcttccagcccaagctcctgcataaactcgtcacgttcttcgtcgtccagttcggcaatgtctgcttcaacagcagcacaaaccggaaccacaacagaaccttctttcgccgcgatttcacgcacctggtcaagatatgggttgttttcaaaaccgtcttcgttgacgttggcgatgtacattgttggtttcagcgtcaggaagctcaggtaacgaatagccgctttctcttcagcgcttaaatccagcgcgcgcagcatacctgcattttccaactggggcaggcatttttccaggaccgccagctcagctttcgcgtctttatcgccacctttggctttcttctgtacgcgatgaatcgcacgttcgcaggtgtcgaggtctgccagcgccagttcggtgttgataacttcaatatcgtcagccgggttaactttgccggaaacgtgaatgatgttgtcattttcaaagcagcgaacaacgtgaccgatcgcttcggtttcacggatgttggtcaggaactggttacccagaccttcgcctttgcttgcgccttttaccagaccggcgatatcgacaaattccatggtcgtgggaagcgtacgctgcggttttacgatttcagccagttgatccaggcgaggatcaggcattggtacgacgcctgtgttcggctcaatggtgcagaatggaaagttggccgcttcaataccggctttggtcagcgcgttgaacagggtagatttcccgacgttgggcaaaccgacgataccgcatttgaatcccatgatttaaatcaccttaatatcttaataatcaacctgttattgctaacagattgcagaaatggaaataactttgcctattatacacggcactcggcaaaaatgccgcagacaacgacttattgcgctttaaaggcgtgcaatcggttcgttgctttggtcaagccatctgtaaaccacatttcagtacaacgcgccgcttcgtcaatggcttcatcaattaacttctgttcactaacaggcggtttgcctaacacaaaaccgacaactttatttttatcgcccggatgaccgattccgatgcgtaaacggtgaaagttagggttattacccaatttactgatgatgtctttcagtccattgtgaccaccatggccaccgcccaatttaaatttggcgacgccaggaggcagatccagttcgtcgtgggccaccagaatttcgtccggattaatgcggaaaaaactggccatcgccgcaacggctttgccgctgagattcataaatgtagtcgggactaacaggcggacatcttcgcctccaagagtgactcggctagtataaccaaagaatttagcctcttcgcgcagcggagcgcgcaaacgctctgccagtaagtcaacgaaccaggtaccagcattatgtcgcgttgcggcgtattcagcaccggggttcgccaggccgacaatcaatttaatcgtcacgtttttttgtcctgagtgtgtacataactggcgcgtagtttactggttgcggccccgcttgacaaaaaactgcgtatcaaatgcagataacgtaataattgcctgagtggactattagaaagtcaaggtgttcaggcgtttatttgtaaagttttgttgaaataagggttgtaattgtgatcacgcccgcacataacccactgggtgttgtctatactttacacataaggaagaggggtattccctgttacaacccagaaagttccggaggtgacatatgaaacgcaaaaacgctagcttactcggtaacgtgctcatggggttgggtctggtggtaatggtggtcggcgtggggtatagtatcctcaaccagttaccacagtttaatatgccccagtatttcgcacatggtgcagtgctaagtattttcgtcggtgccattctctggctggcgggtgcccgtgttggcgggcatgaacaggtgtgcgaccgttactggtgggttcgccactatgacaaacgttgccgccgtagcgataatcgccgtcatagctaacaaataatgcagtttgctgaccagtcagtttgcgctgactggtcaatctcgtacttataaatccgccatcgccgcgcgacgattcgggaagaacgccaggcgtcccgggatcggttgaatgccagcgcgagccatagtgcgcagtggctggaattccacgttgcacacgcgcagttcacatccctcgggcagacgcttcacaaaacgctggaacgcatcaagaccaccagcatcaagtaccggaacggcatcccacttcagaatcacaatccgtttgccttcaagacgactctccaggtccgtgaataagccttcagcagcagcaaaaaacagcgggccaataacgcgcagaaccaggacatcgtctggaacatctacgactaccggtgccaggcgagtcatacgtgcgatacgacgcataaacagcaggcttgccagcacgatccccacgctgatggcaataaccatatcaaacaacacggtcaggctcatgcacagcagcatgacgatgatgtcatctttcggcgcatgacgcagcaagtcgaccactttgtgcgcttcactcatgttccacgccaccatcaacagcagggctgccatggcggaaagcggcagccaggagagcagcggtgccagtaccagcagggcaagaataaccagaatagagtggatcaccgcgctgataggggacgttgccccggcacggacgttagcggcagaacgcgcgatggcagctgtagcggtaataccaccaaagaacggagcgataatattccccagtccctgtccaaccagttcgctgttcgccttgtgtttcgtcccggtcataccatccagcaccacggcgcagagcagagattcgattgcgccgagcattgccatactgaatgccgcaggcagcagtgtgcgaatagaatcccaggttagcgtgaattcactattaggcagatcccacggcagcaccagttgcggcagcagttgcggaataccgttaccctgagaaccatcggccaggacgtagtggaattggctaccgatggtagcaacatgtccgccgagcaggttaacaatccccatcaccgcgcaaccagccagcaaggccggaaggtgaccgggtaaacgaatgcccagacgcggccaaaaaacaagaatacctagcgtcacaatgccaatggcagcatcacccacattaatggtcggcagcgccataaataatgcgccgactttttgtagataatgttccgggacatgggccatttgcagaccgagaaaatctttaatctgcatggtaccgatggtgatcccgataccgctggtgaaacctaaggtgacggaaaccggaatatactcaatcaggcgaccaaagcgtgccagacccatcagaatcaaaaagatcccgctcagcaaggtcgcaaccagcagtcctgccagtccaaactgttggctcacgggatagagaattaccacaaatgccgcagtcggaccggaaacgctaaagcgactcccacccgtcagagcaatgacaatccccgcaacagctgcggtatataaaccgtactggggtgccacaccactaccaatagccaacgccatcgccagcgggatagcaataatcccgacggttatcccggcaatcaggtcacgggtaaaccgtgcggcagtatatttttctttccagcaagcgtcgatcagagcgcggaaaggcatcacatgactggaaaatattttgttcacaataatgtttcatccgtgagcgcatcatctgtcaactaaatggcaggtgaaggaggcataggtcatacaaatggatattacagacaaaaaaacccgccgcagcgggtctttgagccgggttcgattagtgttcgaacatggcagagatgctttcttcgttgctgatacgacgaatcgcttcggccagcataccactcagggtcagagtacgcacgttcggcagacttttgatttcatcgctcagcggaatggtatcgcagacaacgacttcatcaattacagagttacgcaggttgttcgccgcgttgccagagaagatcgggtgagtcgcgtacgcaaatacacgtttagcaccacgttctttcagagcttcagcagctttacacagcgtaccgccagtgtcgatcatatcatcgaccagtacgcagtcacgacctgcaacgtcaccgatgatatgcatcacctgactaacgttcgcacgcggacgacgtttgtcgatgattgccatatcggtatcgttcagcagcttagcgatagcgcgggcacgcacaacgccgccgatgtccggagaaaccacaattgggttatccagattcagctgcagcatgtcttccagcaggatcgggctaccaaatacgttatcaaccggaacgtcgaagaaaccctgaatctgttcagcgtgcagatccactgtcagcacacggtcaacaccgacgctggagaggaagtctgcaaccactttcgcagtgattggtacacgagcggaacggacgcgacggtcctggcgcgcatagccaaagtaggggataacagcggtgatacgacctgcggaagcacgacgcagggcatcaaccataacgactaattccatcaggttgtcgttagtaggggcacaagtggactggatgatgaaaatatcaccaccgcgtacattttcattaatttgtacgctgacttcgccatcgctaaagcgacctacagcggcgtcgccgagactagtgtacaggcggttggcaatacgttgtgctagttccggggtggcgttaccagcaaaaagcttcatatcaggcacgagaagaacctcaggcatgcgtccattggtggaaagaatctgccgaaaactgtgcgggccaggcatgatcctttccaggcggtgtattaaagagcgcgatgcaacgtctggaacaaggtgacgttgtcaccgaaactcagcttgcccggcttaaagcatggctctgtgcaatggggaaagattagcgcctttcgccacaaagccattgagccattccggggcttgctctagcacctggcgggcttcagactctgtatcaaattcagcaaagacacaggcccctgtcccagtcaggcggctcggggcgtattctaacagccaggaaagcaccgcatcaacctcgcgaaaacgttttcttgcgataacctcgcaatcattgctgaattcacattttagcaacgtttctatactcctttttggcgtattgcgcgggagttcaggatctttaaaaatcaccggagtcggaatacttacaccagggtgcgccaccagataccacttctctggcggatccaccggcgttagtatttcaccaacgccttcggcaaacgcggcatgcccccgaacaaagacaggaacatctgcgcccagcgtcagccccatttccgccagctcatccatgcttagcccgcattgccagagatgatttaatgccaccaggaccgtcgcggcattggaactaccaccgccgagaccgccgcccatcggcaaacgcttgtcaatgctgatattcgcaccgcttcccgtcggaagacgcccgctgtctgccgcagttttcatcaacaatcgcgctgcgcgaacgatcaggttatcttcatgttccacgccttcaacgggcgttaacagacgaatatccccatcgtcacgaagctcaatgctgatggtgtcgccgtaatcaagaaactgaaacagcgtttgcagcgtgtggtaaccatccgcacgctgaccggtaatgtataaaaacagattaagttttgccggagagggccactgtgtccgcattatttcactatccagttatccatttttaacttgatgcgttgaccaccgtcggtgagttccatattggctggcatcgcaggttgcgttttggtgtcataaccaccataaacaaccttccagtttttgccattctggctgtaggtaatttcgctcaggcggtactggtcgtccagtttgtagtcggttgcatcacccggtaaacctaaaatccactggcgcaagctgttgagcggaattggcattccggtcaatttgccaatcatctcttcggcgtcatcggcggtataacgctgacctttattgtcgactaactgcacgttacccggttgagcattcagctccagttccgtgctgcccaatgggttagtgagcagcagacggtagcgatcctggccggtttgctgccagaaaaagcgggcgtacactttttgttggtcagaaatataagcgaacgcgccgcgagtctgatactgattaagattgcgcacgtcttgctgatgctgacgccattgtgggctatccgggcttttgccaggacctttgggcgtggtaacggaacaggcagtgagcacaagagcagccagcggtagcaggcggataagacgaaaatcgggcaggggcatagtgatgacaagtccttgagatacgttgcagttataacccttaatgctagcgttaccgtccgctatcgtctatgttcaagttgtcttaattgccagaatctaacggctttcggcaattactccaaaagggggcgctctcttttattgatcttacgcatcctgtatgatgcaagcagactaaccctatcaacgttggtattatttcccgcagacatgacccttttagcactcggtatcaaccataaaacggcacctgtaagcctgcgagaacgtgtaagctttagcccggataagctcgatcaggcgcttgacagcctgcttgcgcagccgatggtgcagggcggcgtggtgctgagcacgtgcaaccgcacggaactttatcttagcgttgaagagcaggacaacctgcaagaggcgttaatccgctggctttgcgattatcacaatcttaatgaagaagatctgcgtaaaagcctctactggcatcaggataacgacgcggttagccatttaatgcgtgttgccagcggcctggatagtctggttctgggggagccgcagatcctcggtcaggttaaaaaagcgtttgccgatagccaaaaaggtcatatgaaggccagcgaactggaacgcatgttccagaaatctttctctgtcgcgaaacgcgttcgcactgaaacagatatcggtgccagcgctgtgtctgtcgcttttgcggcttgtacgctggcgcggcagatctttgaaagcctctctacggtcacagtgttgctggtaggcgcgggcgaaactatcgagctggtggcgcgtcatctgcgcgaacacaaagtacagaagatgattatcgccaaccgcactcgcgaacgtgcccaaattctggcagatgaagtcggcgcggaagtgattgccctgagtgatatcgacgaacgtctgcgcgaagccgatatcatcatcagttccaccgccagcccgttaccgattatcgggaaaggcatggtggagcgcgcattaaaaagccgtcgcaaccaaccaatgctgttggtggatattgccgttccgcgcgatgttgagccggaagttggcaaactggcgaatgcttatctttatagcgttgatgatctgcaaagcatcattagccacaacctggcgcagcgtaaagccgcagcggttgaggcggaaactattgtcgctcaggaaaccagcgaatttatggcgtggctgcgagcacaaagcgccagcgaaaccattcgcgagtatcgcagccaggcagagcaagttcgcgatgagttaaccgccaaagcgttagcggcccttgagcagggcggcgacgcgcaagccattatgcaggatctggcatggaaactgactaaccgcttgatccatgcgccaacgaaaagtcttcaacaggccgcccgtgacggggataacgaacgcctgaatattctgcgcgacagcctcgggctggagtaacagtacatcattttctttttttacagggtggaggaggaataatggaatatcaacactggttacgtgaagcaataagccaacttcaggcgagcgaaagcccgcggcgtgatgctgaaatcctgctggagcatgttaccggcagagggcgtacttttattctcgcctttggtgaaacgcagctgactgacgaacaatgtcagcaacttgatgcgctactgacacgtcgtcgcgatggtgaacccattgctcatttaaccggggtgcgagaattctggagcttgccgttatttgttagcccagcgaccttaattccgcgcccggatacggagtgtctggtggagcaggcactggcgcggttgcctgaacaaccttgccgtattctcgatctcgggacgggtaccggggcgattgcgcttgcgctggctagcgagcgcccggactgcgaaattatcgctgtagatcgtatgcctgatgctgtctccctggcacaacgtaatgcccagcatctggcgatcaaaaatatccacattctgcaaagcgactggtttagcgcgctagccgggcagcagtttgcgatgattgtcagcaatccgccgtatattgacgagcaggaccctcatcttcaacaaggcgatgtccgctttgagccgctcactgcgctggttgcggcagacagtggaatggcagacatcgtgcatatcatcgaacagagccgtaacgcgctggtatccggcggctttctgcttctggaacatggctggcagcagggcgaagcggtgcgacaagcatttatcctcgcggggtatcatgacgtcgaaacctgccgtgactatggtgataacgagcgcgtaacgctcggccgctattatcaatgacaagtttttctacactgcttagtgctcatcttattagtatcgcgctttctgttgggctattaaccttacgtttctggctacgttatcagaagcatccacaggcatttgctcgctggacgcgcattgtgccgccggttgtcgatacgctgttactgttaagcggcattgcgttgatggctaaagcgcacatcctgccattttccgggcaggcacagtggctgactgaaaagctgtttggagttatcatttatatcgttttgggttttattgcactcgattatcgtcgtatgcacagtcagcaggcgcgcattattgccttcccgctggcgttggtggtgctgtacatcatcattaaactcgccaccacaaaagtaccgttactggggtaagtcatgagaagcttagctgatttcgaatttaataaagcgccattgtgcgaaggcatgatcctggcttgcgaagcaatccgccgcgattttcccagccaagatgtttacgacgaactggagcgtctcgttagtctggcgaaggaagaaatcagccagcttctgcctttagaagagcagttggaaaaactgatcgcgctgttttacggcgactggggatttaaagccagtcgcggtgtttatcgtctttccgatgcattatggctggaccaggtgttaaagaatcgacagggcagtgcggtaagtttaggtgcggttttattatgggtcgcgaatcgtctcgatttgccgctgctgccggtgattttccctacgcagctgatattgcgcattgaatgtccggatggcgaaatttggctgattaatccttttaacggtgaaagcttaagcgaacatatgctggacgtatggttaaagggaaatatcagcccgagcgcggaactgttttatgaagaccttgatgaagctgataacattgaggtaatccgcaaattgctggatacactcaaagccagcttgatggaagaaaatcagatggagctggcgttacgcaccagcgaagctttattacaattcaaccctgaagatccctatgaaattcgcgatcgcgggttgatttatgcgcaactggattgcgaacacgttgcgttgaacgatttaagttatttcgttgaacagtgtccggaagacccgatcagcgaaatgatccgtgcgcaaataaataacatcgcgcataaacatattgtgctgcattaattaatcgacattttactcaagattaaggcgatcctatgaaacaaaaagtggttagcattggcgacatcaacgtagcaaatgacctgccgttcgtactgtttggcggtatgaacgtgttggaatctcgcgatctggcgatgcgcatttgcgagcactacgtaactgtgacccagaaactgggtatcccttacgtgttcaaagcctcttttgacaaagccaaccgctcctccatccactcttatcgtggaccgggcctggaagaagggatgaaaatcttccaggagttgaagcagacttttggcgtgaaaattatcaccgacgttcacgaaccaagtcaggcacagcccgttgctgatgtcgtggatgtgattcagttgccggcgtttcttgctcgccagactgacctggttgaagccatggcgaaaaccggtgcggtaattaacgtcaagaaaccacagtttgtcagcccgggacagatgggtaatatcgttgataaattcaaagaaggcggcaacgaaaaagtgattctttgcgatcgcggtgctaacttcggctatgacaacctggttgtcgatatgctgggcttcagcattatgaagaaagtgtctggtaacagcccggtgattttcgacgtgacccacgcactgcaatgccgcgatccgtttggcgcagcttccggtggtcgtcgtgctcaggtggctgagctggcacgagccggtatggcggtaggtctggcggggctgtttattgaagcgcatccggatccggaacatgcgaaatgtgatggtccatccgcgctgccgctggctaaactggaaccgttcctcaagcagatgaaagcgattgatgatctggtgaaaggtttcgaagaactggataccagcaagtaatcttttttgcttgaaaaataaagtattagcgttctgcgttaagacttttttcatgggtgccggatacaaaaaaggccgcaggctgttacccctgcggccggtttcgggcgcatattgccatcacggcagcctgacgcccgttttcaccttacttccggttacgccaccagctgacaatcgctgcggtaataattcccgccaggatcggtgctgccaggtcgtgccagaaaatcatggcaaactgcgcgagcgtcatatagccgccttgttgtaatgacaacattttgcggctattcttgaattgttctggttcaagattagcccccgttctgttgtcaggttgtacctctcaacgtgcgggggttttctctttccagcaaccaatgccaccagggataaagcccccgcaacattgcgcctcaccggataacgccggcttggtgtggatactacgactcaattcatcttcacttcatccctgaaatgtttgcaatgaagagtgcattccggtttttcaacagctgttacagtcatttcatgagtgctctggatgaggcttccagctcgggttgccaatatttacttgtggaagtgataaagacaaaaatggccgcaggctgttacccctgcggccggtttcgggcgcatattgccatcacggcagcctgacgcccgttttcaccttacttccggttacgccaccagccgacaatcgctgcggtaataattcccgccaggatcggtgccgccaggtcgtgccagaaagtcatggcaaactgcgcgagcgtcatatagccgccttgttgtaatgacaacattttgcggctattcttgaagtgtctggtttcaagattagcccccgttctgttgtcaggttttacctctcaacgtgcgggggttttctctttccagcaaccaatgccaccagggataaagcccccgcaacattgcgcctcaccggataattccggcttggtgtggatactacgtctcaattcatcttcacttcatccctgaaatgtttgcaataaagagtacattccggcttttcaacagctgttgcagtcgtttcatgagtgctctggatgatgcttccagctcgggttgccaatatttacttgtggaagagataaagacaaaaatggccgcaggctgttacccctgcggccggtttcgggcgcatattgccatcacggcagcctgacgcccgttttcaccttacttccggttacgccaccagctgacaatcgctgcggtaataattcccgccaggatcggtgctgccaggtcgtgccagaaaatcatggcaaactgcgcgagcgtcatatagccgccttgttgtaatgacaacattttgcggctattcttgaagtgtctggtttcaagattagcccccgttttgttgtcaggttttacctctcaacgtgcgggggttttctctttccagcaaccaatgccaccagggataaagccccgcaacattgcgcctcaccggataacgccggcttggtgtggatactacgtcgcaattcatcttcacttcatccctgaaatgtttgcaatgaagagtacattccggcttttcaacagctgttgcagtggtttcgtgcagggtgtggtacaggctcgcaattctgattaacgacctgtccaggtagtatgaagaaatacaataagcaggaatttatattatctcccccgattaccgtcatcggaggagatataactgtcaggcaaatatcgtcatcaaataggcggcaaacagtgccagatgcgctgcgccattgagcatgttagtacgtccggtggagaaggagatatggcacagcactaaagaggccaccatcaccaccatttctggcgcaccaagtgcaaactgcaattcgttacccgtcataaaggcaattagcgtgacgacaggtacggtaaggctaatggttgctaacacactaccaaagaacagattcatcgcgcgctgaacctggttgttcaacactgcttttaatgcacctaaaccttccgggctcagaatcaacagtgccaccaggaagccagtaaaggcgacaggggcattcatgctgtcgagcaatgtctccaggctgctggcgttcattttggtcaccgcaataacggcaatcagatggataatcaaccagatagcatgccacaggctgctatgggcagacggtttaccgtgatgcgggtcgtcatcatcactgtcatcttcgtgctcgtagacaaacaaactttgatgcgttttggtctggatcagcaaaaatacgccatacattgccgcagaaattaatgctaccagtaacgcctgaccggtactaaaattcgccgcaggcagagccattggaaataccagtacgattatcgccagggggaacagcgcaattaaatactgcttgataccaaacagattcatatattgggtggcaaacttacgaccgcccaacaataaactaaagccaaccagcccaccggtaacaatcataatgatactatagagcgtatcacgcattagcgttggcgcggcgtcgccggttgccattaaagcactaatcaaactgacttcaagaataaccacactaaggctaagaataaggctaccgtaaggttctcccaggcgatgggctaatacgtccgcatgacggacaacactaaaggcgctacttaaaataccaataagcgcaagaagattgatggcaatgaccactggtagtgtctggctgcttccccacaggaacagcactaccagcgccagaaccgggaaaataaggctagtctccttgtggcgggtttttaccgcctcttgagcattactcattatggttatccctttgcagatgaatttatcgaaaatgtaaaaaataggtaggaaaaataacagaaagtgtctggatatcggtaacattttacgaatttttaccccgctgtcgattttttactcattggggcataaaaataagtattacgtttagacaatgtttgttttagcgtctcttaagaagagtctgacctgaaaattcttatgttttggcaagagtagatattgttgaccacacttaatgttcaactttgtaaaaggagtcaacgatgccgtataaaacgaaaagcgatctgccggaaagcgtaaagcacgttctaccgtctcatgcccaggatatctataaagaagcgttcaacagcgcatgggatcaatataaagataaagaagatcggcgtgatgacgccagtcgcgaagaaaccgcgcataaagtggcctgggctgctgtgaagcatgaatatgccaaaggggatgatgataaatggcataaaaaaagctaaaaccggtcgcttagttaaagctattcgtgcggtgttgccttgcaagtggtccgtggattgcatattgtcccgttagtggtttcaaaatgagcagtaaaaatgtccggaagacaccaaaaagttgtcgcagggaagtatgcagtggcggaagtgtaaggtgataacgcgtgatttcttgatgaatgccgattgtaaaacggcatttggtgccattgaagaaagtctcttatggagtgcagaacaacgggcggctagcctggcggcgacgctggcttgtcgacctgatgagggaccggtgtggatcttcggctatggaagcttgatgtggaatccggcactggagtttaccgaaagctgcaccggtacactggttggatggcatcgcgcattttgcctgcgcctgaccgccgggcgcgggactgcgcaccagccgggacggatgcttgcactgaaagagggcggacgcaccacaggcgtcgcctatcgactgccagaagagacgctggagcaggaactaaccctgttgtggaagcgagagatgattaccggctgttatctgccaacctggtgtcagcttgatcttgatgatggacgcacagtaaacgccattgtgtttattatggacccgcgacatccagaatatgaatctgatactcgcgctcaggtcatcgcgccgttgattgcggcggcgagcggtccgctgggaaccaacgcacaatacctgtttagtctggaacaggagcttatcaaactgggaatgcaggacgatgggctgaatgatttgctggtaagcgtaaaaaaactgctggcggagaattttccggatggtgtgttacgtccgggattcgcctgagtaaacttcccgcatagtggggcgtcagacgccccctcaaacattaaaatgtgagcactttatcggcactcagcgtccattgcgccagttccacaagagtaccgatttccaccccatcaatcagaggaagtgtactaatcccgcgcccgtcggtacaggttttgcacaatttcaccggtacattctgagcggtaaggatctccagcatttgctgaatgttgtagccttcccctggtttttgcccgcgcaacccggctgtgaccgcatcagacatgaggaacagacgcagatccagattgctctcctgctctcgtaacgcaatggccagccgcaagctgttaaacaaggattcgctcccgtaaggtgcgccattggcaacgatcacgattttttgcattatttactcctgtattcagggaattagacactcatcttctatcttactgcttctgcagcgtctgaccaatcggtcacatttttaaggattttcctgaaagcgcgagaaaatacgacaaaagttgccagtaatcgttattctttaaggctatggtttttcattattaccggaagttaccgacgttttgagccgtttcgttcctcgcattatcccgttttatttactcttgcttgtagcaggcggtacagctaacgcacaatctaccttcgagcaaaaagcggcaaatccctttgataataacaatgatggtctgccggatttaggcatggctcccgaaaatcatgatggggaaaaacactttgctgaaattgtgaaagatttcggcgaaaccagtatgaatgataacgggctggatactggcgagcaggcaaaagctttcgcattgggaaaagtccgcgacgcgcttagtcaacaggttaatcagcacgtagagtcctggctaagtccgtggggaaatgccagtgttgacgtcaaagtggataacgaaggacatttcaccggcagtcgtggaagctggtttgtgccgttacaagataatgatcgttatctcacctggagccagcttggtcttactcagcaggataatgggttggtgagcaatgtgggcgttgggcaacgctgggcgcgcggcaactggctggtgggttataacactttttatgacaacttgctggacgaaaatcttcagcgagcgggctttggtgccgaagcgtggggcgaatatttgcgattaagcacaaacttttatcagccgtttgctgcatggcatgaacagacagccacgcaggaacaacggatggcgcgcgggtacgacctgacagctcggatgcgcatgccgttctatcaacacctcaataccagtgtcagcctagaacagtattttggtgatcgtgttgatttgtttaactctggtacgggttatcacaatcccgtcgcgttgagtctgggattaaattacacccctgtgccattagtcactgtgacggcccagcataaacagggtgaaagtggcgaaaatcaaaataacctcgggctgaatcttaattaccgctttggtgtaccgctcaaaaaacaactttctgcgggcgaggttgccgaaagtcagagcttacgtggtagtcgctatgacaatccgcagcgaaataatctaccgactcttgagtaccgacagcgaaaaacgttaacggtgtttctggcgacaccgccgtgggatctaaaacctggcgaaacagtgccgctgaaattacaaatccgcagtcgttacggtattcggcaactgatttggcagggcgatacgcagatattaagtttgacgccgggcgcacaagccaacagcgcggagggctggacgctgatcatgcctgactggcagaacggggaaggggcaagcaatcactggcgattgtctgtggtggtggaagataaccaggggcagcgtgtctcctccaatgagatcacgctaacgcttgtcgaaccgttcgatgcattgagtaacgacgaactgcgctgggaaccgtaatcagaaaatgcgctcctgatgcacccataccgctgcttccacgcgagacttgagcttcattttcttcagcatgtgcttgacgtgcacttttactgtgctttcggtgatatccaggcggcgggcaatcatcttgttcggcaaaccctgggcaatcagcttgagaatatcgcgctcgcgtggggttaactggttaacatcgcgctcagtagtggcacggttagcgcgcaagctggcggccagaacaggcgttaatgcttcgcttaataccatttcgccagcagctgcctgatgcaatgctttcagcagatcttccggttccatatcttttaacagatagccatccgcgccgcgtttcagtgcggtgaccacatcttcttcatggttagagacgctgaataccacaatgcgcccactgagggacttttcgcgcagtttatccagcgtttccagaccgttcatgccgggcatattgagatctaacaggatcagatcgggatcaagagactccgccagttcaataccctgttcgccattactcgcttcgccaaccacggtgatatctggtgccatactgataagctgttttacgccagttcgcagcatcgggtgatcgtcaatcagcaggatagtagccggttcctgattactcatgggtatctccttggacgtctgtgaaagttttttcgggaataaaggtgaccaccacttcggtgccaccactttcacgacggcggacgcggcaatcgcctcgtaaactttgcgcacgatcgcgcattattatcatgccgtagtgattgctgcggatggcattttcaggcacgccgcagccgttatcctggacggtcagtttgacctgattatcgttttgcgccaccgtcaccacgacttcactcgcttggctatgtttgagggcgttacttaatgcctcacgggcaatttgcaacaagtggattgcctgatggctaggcaccaggcgaggcggcaattgataatccagcttcaccgggaagccaaatttggcgctgtactcttcgcaactcgcctccagcgccggacgtaatccaggctcggtgagctgcaagcggaatgtggtgagcaattcacgcaactgcgcccaggatgcattcagttcgttacggatctgacttaacagttcgcggctgctttctggcagcgcatcgccctgcatctgtaaacaactcacctgcatcttcatgcaagagagagattgggcaatagaatcatgcagttcgcgcgcaatggtggcacgctcttccatcacgatcaactgttgctgacgttcctgatggcgatccagcgccagcgtggcggtgagttgttcaaccagggtatccaccagttgttgttgatcatggctaagatgacgcccctgcggcagggtcgccagcaaaataccgtactgcgtatgagagtcagccagccgccacttcagggtcgtgccgcgatcaccaacgggtaatacgccgcgcgggcagagctggcagcctttatcatcacaagtcatatctggctggcaggtaaactcctgatgattctcttcatcatcagtgtcatacacccgcaattcgatatcacgtagcagggttaaattctgtaagccgttgagtacaggactcaggcgttcacacagcggggcgcgggaatgcaaacggcggttagcctgccataaaaaagagaggatctgatttttatgctccagcccggcggttttctcctgaacccgctgctcaagtacggcataactttcggccagttctgcagacatattgttcaacgcagttccaagcatcgccatttcgttgcgcccgctgatgtttgcgcgttgggtaaaatcgcgatgactgacggcactcgccattgccagcagttgccgccacggttgtagcagtcgcgcccgcaaccagataatagtgaacaccagtaaaagtgccataaataccgccattacccgatggaccagtaccactgtctcgatgcgcatttccgtggtgcggtcaaaaccagataccagttgatcaagcccggcaacaaactggctgacatccgcactcaccgtttctcggttttgtgcacgcatcagcgcagggatcagttcattacgccagtaatcttgtaaaccctgtaattgcgccagttgtccgtctcgttctgctgctcgagtcaactcggcgctaaatgccgtttgttccatctctttaattaagggcttgtctttctcgcttaatggcactgccgccaacagacggtaactttgcatgcgcaggcttcccgctttgttgatcgcatgggcgctgccctgaacgccttgcaccagccagccagaaaccgccatccctgccagtccaatagcagtagaaagcaacacaataagcgcaacctgattaaccagggtgagcggagagagacaacgtttaagcatgtaaacctcttccttcaggctttaaatgagcaataaccttaatgaatgtgacgatacattctggaatggcagtattctcggctattggctgaagtatacccatacccggaaagagttactccttatttgccgtgtggttagtcgctttacatcggtaagggtagggattttacagcaccgtgaaaaatctcataatttttatgaagtcactgtactcactatgggtaatgataaatatcaatgatagataaagttatcttatcgtttgatttacatcaaattgcctttagctacagacactaaggtggcagacatcgaaacgagtatcagaggtgtctatgagtcacagttccgcccccgaaagggctactggagctgtcattacagattggcgaccggaagatcctgcgttctggcaacaacgcggtcaacgtattgccagccgcaacctgtggatttccgttccctgtctgctgctggcgttttgcgtatggatgttgttcagcgctgttgcggtgaacctaccgaaagtcggctttaattttacgaccgatcagctatttatgttgactgcgctgcctagcgtttctggcgcgttattacgtgttccatactcctttatggttcctatcttcggtggtcgtcgctggacggcgttcagcaccggtattctgattattccttgcgtctggctgggttttgccgtgcaggatacctccacgccttatagcgtcttcatcatcatctctctgctatgcggctttgctggcgcgaacttcgcatccagtatggcaaacatcagcttcttctttccgaaacagaagcagggtggcgcgctgggtctgaatggtggtctgggaaacatgggcgtcagcgtcatgcagttggttgctccgctggtggtaagtctgagcattttcgcagtatttggtagccagggcgtcaaacagccggatgggactgagctgtatctggcgaatgcgtcctggatatgggtgccgttccttgccatcttcaccattgcggcgtggtttggcatgaacgatcttgctaccagcaaagcctccatcaaggagcagttgccggtactcaaacggggtcatctgtggattatgagcctgctgtatctggcaaccttcggctccttcatcggcttctccgcgggctttgcaatgctgagtaaaacgcagttcccggatgttcagattctgcaatacgctttcttcgggccgtttattggtgcgctggcgcgttctgcaggtggtgcattatctgaccgtctgggcggaactcgtgtcacgctggtgaactttattctgatggcgattttcagcggcctgctgttcctgaccttaccgactgacgggcagggcggaagcttcatggcgttcttcgcggtcttcctggcgctgttcctgacagctgggctgggtagtggttccactttccagatgattagtgtgatcttccgtaaactgacaatggatcgcgtgaaagcagaagggggttctgacgaacgtgcgatgcgtgaagcggcaaccgacacggcggcggcgctgggtttcatctctgcgattggcgcgattggtggcttctttatcccgaaagcgtttggtagcagcctggcattaacgggtagcccagtcggcgcaatgaaggtatttttgattttctatatcgcctgcgtagtgattacctgggcggtatatggtcggcattctaaaaaataaaccgttactcgtcatacttcgggttacatgtgctgcggctgcgttcattcaccccagtcacttactttagtaagctcctgggattcattcacttgccgccttcctgtaaaccgaattatatagagtaaaatatttgattatcctttgcgcggcatgatgtcgcgctttttttatgcgtcatttagttacaacatactaatgttatatggtttatttcgccggatttcattaagagccattaatatgttacccatggggaatactccttaatacccatctgcataaaaatcttaatagtttaaataactacaggtataaaacgtcttaatttacagtctgttatgtggtggctgttaattatcctaaaggggtatcttaggaatttactttatttttcatccccatcactcttgatcgttatcaattcccacgctgtttcagagcgttaccttgcccttaaacattagcaatgtcgatttatcagagggccgacaggctcccacaggagaaaaccgatgagtaaattcctggaccggtttcgctacttcaaacagaagggtgaaacctttgccgatgggcatggccagcttctcaataccaaccgtgactgggaggatggatatcgccagcgttggcagcatgacaaaatcgtccgctctacccacggggtaaactgcaccggctcctgcagctggaaaatctacgtcaaaaacggtctggtcacctgggaaacccagcagactgactatccgcgtacccgtccggatctgccaaaccatgaacctcgcggctgcccgcgcggtgccagctactcctggtatctttacagtgccaaccgcctgaaatacccgatgatgcgcaaacgcctgatgaaaatgtggcgtgaagcgaaggcgctgcatagcgatccggttgaggcatgggcttctatcattgaagacgccgataaagcgaaaagctttaagcaggcgcgtggacgcggtggatttgttcgttcttcctggcaggaggtgaacgaactgatcgccgcatctaacgtttacaccatcaaaaactacggcccggaccgtgttgctggtttcagcccaattccggcaatgagcatggtttcttacgcaagcggtgcacgctatctcagcctgattggcggtacttgcttaagcttctacgactggtactgcgacttgcctcctgcgtctccgcaaacctggggcgagcaaactgacgtaccggaatctgctgactggtacaactccagctacatcatcgcctgggggagtaacgtgccgcagacgcgtaccccggatgctcacttctttactgaagtgcgttacaaagggaccaaaactgttgccgtcacaccagactacgctgaaatcgccaaactgtgcgatctgtggctggcaccgaaacagggcaccgatgcggcaatggcgctggcgatgggccacgtaatgctgcgtgaattccacctcgacaacccaagccagtatttcaccgactatgtgcgtcgctacaccgacatgccgatgctggtgatgctggaagaacgcgacggttactacgctgcaggtcgtatgctgcgcgctgctgatctggttgatgcgctgggccaggaaaacaatccggaatggaaaactgtcgcctttaataccaatggcgaaatggttgcgccgaacggttctattggcttccgctggggcgagaagggcaaatggaatcttgagcagcgcgacggcaaaactggcgaagaaaccgagctgcaactgagcctgctgggtagccaggatgagatcgctgaggtaggcttcccgtactttggtggcgacggcacggaacacttcaacaaagtggaactggaaaacgtgctgctgcacaaactgccggtgaaacgcctgcaactggctgatggcagcaccgccctggtgaccaccgtttatgatctgacgctggcaaactacggtctggaacgtggcctgaacgacgttaactgtgcaaccagctatgacgatgtgaaagcttataccccggcctgggccgagcagattaccggcgtttctcgcagccagattattcgcatcgcccgtgaatttgccgataacgctgataaaacgcacggtcgtagcatgattatcgtcggtgcggggctgaaccactggtatcacctcgatatgaactatcgtggtctgatcaacatgctgattttctgcggctgtgtcggtcagagcgggggcggctgggcgcactatgtaggtcaggaaaaactgcgtccgcaaaccggctggcagccgctggcgtttgcccttgactggcagcgtccggcgcgtcacatgaacagcacttcttatttctataaccactccagccagtggcgttatgaaaccgtcacggcggaagagttgctgagtccgatggcggacaaatcccgctataccggacacttgatcgactttaacgtccgtgcggaacgcatgggctggctgccgtctgcaccgcagttaggcactaacccgctgactatcgctggcgaagcggaaaaagccgggatgaatccggtggactatacggtgaaatccctgaaagagggttccatccgttttgcggcagaacaaccagaaaacggtaaaaaccacccgcgcaacctgttcatctggcgttctaacctgctcggttcttccggtaaaggtcatgagtttatgctcaagtacctgctggggacggagcacggtatccagggtaaagatctggggcaacagggcggcgtgaagccggaagaagtggactggcaggacaatggtctggaaggcaagctggatctggtggttacgctggacttccgtctgagcagcacctgtctctattccgacatcattttgccgacggcgacctggtacgaaaaagacgacatgaatactagcgatatgcatccgtttattcacccgctgtctgcggcggtcgatccggcctgggaagcgaaaagcgactgggaaatctacaaagccatcgcgaagaaattctccgaagtgtgcgtcggccatctgggtaaagaaaccgacatcgtcacgctgcctatccagcatgactctgccgctgaactggcgcagccgctggatgtgaaagactggaaaaaaggcgagtgcgacctgatcccaggtaaaaccgcgccacacattatggtcgtagagcgcgattatccggcgacttacgaacgctttacctctatcggcccgctgatggagaaaatcggtaatggcggtaaagggattgcctggaacacccagagcgagatggatctgctgcgtaagctcaactacaccaaagcggaaggtccggcgaaaggccagccgatgctgaacaccgcaattgatgcggcagagatgatcctgacactggcaccggaaaccaacggtcaggtagccgtgaaagcctgggctgccctgagcgaatttaccggtcgtgaccatacgcatctggcgctgaataaagaagacgagaagatccgcttccgcgatattcaggcacagccgcgcaaaattatctccagcccgacctggtctggtctggaagatgaacacgtttcttacaacgccggttacaccaacgttcacgagctgatcccatggcgtacgctctctggtcgtcagcaactgtatcaggatcaccagtggatgcgtgatttcggtgaaagcctgctggtttatcgtccgccgatcgacacccgtagcgtgaaagaagtgataggccagaaatccaacggcaaccaggaaaaagcgctcaacttcctgacgccgcaccagaagtggggtatccactccacctacagcgacaacctgctgatgctgactttaggtcgcggtggtccggtggtctggttgagtgaagccgatgccaaagatctgggtatcgccgataacgactggattgaagtcttcaacagcaacggtgctctgactgcccgtgcggttgtcagccagcgtgttccggcagggatgaccatgatgtaccacgcgcaggaacgtatcgttaacctgcctggtagcgaaattacccaacagcgtggtggtatccataacagcgtcacccgtatcacgccgaaaccgacgcatatgatcggcggctatgcccatctggcatacggctttaactactatggcaccgtaggttctaaccgcgatgagtttgttgtagtgcgtaagatgaagaacattgactggttagatggcgaaggcaatgaccaggtacaggagagcgtaaaatgaaaattcgtagtcaagtcggcatggtgctgaatctcgataagtgcatcggctgccacacctgtagtgttacctgtaaaaacgtctggaccagccgtgaaggcgtggaatatgcgtggttcaacaacgtggaaaccaagccgggccagggcttcccgactgactgggaaaaccaggaaaaatacaaaggcggctggatccgtaaaatcaacggcaaactgcagccgcgcatgggtaaccgtgccatgctgctgggtaaaatcttcgctaacccgcatctgccggggatcgacgattattacgagccgttcgattttgactatcagaacctgcataccgcgccggaaggcagcaaaagccagccgattgcccgtccgcgtagcctgattaccggggaacggatggcgaaaatcgaaaaagggccgaactgggaagatgacctgggcggtgagtttgacaaactggcgaaagacaagaacttcgacaacatccagaaggcgatgtatagccagttcgaaaacaccttcatgatgtatttgccgcgcctgtgcgaacactgcctgaacccggcatgtgtggcgacctgcccgagcggtgcgatttacaagcgtgaagaagatggcatcgtcctgatcgaccaggataaatgccgtggctggcgtatgtgcatcactggatgcccgtacaaaaaaatctacttcaactggaagagcggtaagtctgagaagtgcatcttctgctatccgcgtattgaagcgggtcagccgaccgtgtgcagtgaaacctgtgtcggtcgtatccgttatcttggcgtgctgttgtacgatgccgacgctattgaacgtgcagccagcaccgagaacgagaaagatctttaccagcgtcagctggacgtgttcctcgatccgaacgatccgaaagtcatcgagcaggcgattaaagacggtattccgctgagcgttattgaagccgcacagcagagcccggtttataaaatggcaatggaatggaaactggcgctgccgctgcatccggaatatcgcacactgccgatggtctggtacgtgccgcctctgtctccgattcagtctgcagcagacgcgggtgagctgggtagcaacggcattctgccagacgtcgaaagcctgcgtattccggtacagtatctggcgaatctgctgaccgccggtgataccaaaccggtactgcgcgcactgaaacgtatgctggcgatgcgtcattacaaacgtgctgaaaccgttgacggtaaagttgatacccgtgcgctggaagaggtcggtctgaccgaagcccaggcacaggagatgtaccgttatctggcgattgctaactacgaagatcgctttgtggtgccgagtagtcatcgtgaactggcacgggaagccttcccggagaaaaatggctgcggctttacctttggtgatggctgccacggtagtgataccaaattcaatctgttcaacagccgtcgtatcgatgccatcgatgtgaccagcaaaacggagccgcatccatgatcgaactcgtgattgtaagccgtctccttgaatatccggatgctgccttatggcagcatcaacaagagatgtttgaggcgattgccgcgagcaaaaatctgccaaaagaggatgcccatgcgctgggcattttcctgcgcgatttaacgacgatggatccgctcgatgcccaggcgcagtacagcgaactgttcgaccgtggccgcgccacgagtctgttgctgtttgaacatgtgcacggcgaatcccgcgaccgcggccaggcgatggtggacctgctggcgcagtacgagcagcacggcttgcagttaaacagccgcgaattgccggaccatctgccgctgtatctggagtacctggcgcagctgccgcaaagcgaagccgtggaaggtttgaaagatatcgcgccgattctggcattgctgagcgcgcgtctgcaacagcgtgaaagccgttatgccgtgctgtttgatctgctgctgaaactggcgaataccgctatcgacagcgacaaagtggcggaaaaaattgccgacgaagcgcgcgatgatacgccgcaggcgctggatgctgtctgggaagaagagcaggttaaattctttgctgacaaaggctgcggtgatagtgcaatcactgcgcatcagcgtcgctttgccggtgccgtcgcgccgcaatatctgaatatcaccaccggaggacagcactaatgcaattcctgaatatgttcttctttgatatctacccgtacatagccggggcggtcttcctgattggtagctggctgcgttatgactacgggcagtacacctggcgcgcggcgtccagccagatgctggatcgcaaagggatgaacctggcgagcaacctgttccatatcgggattctggggatttttgtcggtcacttcttcggtatgctgacgccgcactggatgtatgaagcctggctgccgattgaagtgaaacagaaaatggcaatgtttgctggtggtgccagcggcgtgctgtgtctgattggcggcgtgctgttgctgaaacgtcgtctgttcagcccacgcgtgcgtgcaaccactaccggagcggatatcctgatcctgagcctgctcgttatccagtgcgcgctgggcctgttgaccattccgttctccgctcagcatatggacggtagcgagatgatgaaactggttggctgggcgcagagcgtggtgaccttccacggtggcgcttctcaacacctcgatggtgtggcgtttatcttccgtctgcacctggtgctggggatgacgttattcctgctgttcccgttcagccgtctgatacacatctggagcgtaccggtggagtatctgacacgtaagtaccagctggtgcgcgctcgtcactaagcgaattttagttcacatagaccctgcttcggcggggtttttttatgggcacggtgcggggtgagttgtcggatgcgcttcgcttatccgacctacaggggaggatattgtaggcccggtaaacgtggtgccatcgggcaaaattagctcggagtaacaggttttgattatttaaggaagcgatggtggtgggggaaggattactcagcgctgcgcgcttcgcccttcgggtcgttgcctgcggcaacgctctcagcctggcgctcaagagcaaccttggtcgaagcttcagttccttccccgcttgggcagaatatttgattgcggatagctttgagaattccggggcttttgaaagtgatggtggtgggggaaggattactcagcgctgcgcgcttcgccctagcggtcgttgcctgcggcaacgctctctcgctgacgctcgagccgaaccttaatcgaagcttctcatccttccccgcatgggcagaatatttgattgcggattcgcttgagagttcagggacttttgaaagtgatggtggtgggggaaggattactcagcgctgcgcgcttcgcccttcgggtcgttgcctgcggcaacgctctctcgctggcgctcgagtgctaccttggtcgaagcttctcatccttccccgcatgggcagaatatttaattgcggattcgttgggaagttcagggacttttgaaagtgatggtggtgggggaaggattcgaaccttcgaagtcgatgacggcagatttacagtctgctccctttggccgctcgggaaccccaccaggggtaattcaaattttgaggtaatgcttgagatggtggtgggggaaggattattcgtcgcttcgctcctcacccttcgggccgttgcctgtggcaacgttctctcgctttcgctcgaatcgaaccttagtcgaaggttctcacccttccccgatgagtgcaaactttcacaatctcaccgaagttaccacatcgctgtggtgaattatggtggtgggggaaggattcgaaccttcgaagtcgatgacggcagatttacagtctgctccctttggccgctcgggaaccccaccacggggtaatgctttttactggcctgctcccttatcgggaagcggggcgcatcatatcaaatgacgcgccgctgtaaagtgttacgttgagaaaaatgaactggttgcgtaattttcatccgtaacggattaaaggtaaccagttatttttgctggcgattaaagaataatcgttcgattaccgtaaacaaagacgcgctgtgccagtactttgtatagtgcacgacttaagacgtttttctcgacgtcacgacctgcgcgcatcatatcttcagctgtgtaggtatgatcgacatgaataacgtcctgcatgatgattgggccttcgtccagattgtcattcacatagtgagcggttgcgccaataatcttcacaccacgttcataggcctggtgataaggacgtgcgccaataaacgctggcaggaaactatggtgaatattgatgatcttattcgggaagcgtgccacaaattccggcgttaatacccgcatatacttcgccagcaccacgtagtcaggttgataagcatcaatggcatccgccatcttttgatcgtgctcgttgcgggttaacccttcatggcttaccagctcaaacggaatatcaaaacgctcaaccagagaacgtaaagtatcgtggttaccaataactgccgcgatttcgacatccaggccgccgtaattggctttcatcaacaaatcgccaaggcaatgcgcttctttagtgaccagaatcactatccggcgacgaccggcaggattcagctcacgcacggagccttctggcaatgcgctatcgagatccgccagcagggtggaatcattaaaaatcccttccagttccgtgcgcataaaaaagcgcccggtacggtgatcaacaaattcattgttctgtacgatatttaactcgtgcttgtagcaaatattggtaatacgtgcgatcagacctttttggtccggacaaatagtacgcagaactttacgttggagactatgcattgctggaaaaaccttgttgagagtgtttgctaaaccgtaccgtcaaccattattggccgcagcactttttaaattttttaccactaccacaagggcagggatcgttgcgaccaaactgcggacgtgtaccgtcaatatagtaccattgaccgttttctttcaaaaatcggctacgttcaattattgcacctgttttaccaccttcggtaaatcgagcaacaaaactgacaaatccgatattgtcggcgtcctgccaacaatgttcaaatacggtcaatcccaaccattcagtatgcgcaaatccggccatcaattcggcacgtaacgccgctgctccacaagagggatgccaggtctttattaaataatctgcgtcttgcatcacaaaagcgcagtaacggctacgcatgagatgttctggatcaggtgcaaccttttcaccagacacataagggtggcaacataggctatactcgacagcactaccacagggacaaagctgagacacaaataatctccctggaaacaataacggcgtattaaccgcctgagtagcactatgttaaccgagcagtagcgatgtggctacgattgcattccaggggaatcttgcgggaataatgagaaagataaaaatagggctggcgctgggatctggcgcggcgagaggttggagccatattggcgttattaatgcgctaaaaaaagtgggtattgaaattgatatcgttgcaggatgtagtattggtagcctggtgggcgctgcctatgcatgcgatcgattatctgcgctggaagattgggtgacctctttcagttattgggatgttttacgcctgatggatctctcctggcagcgcggtgggttactgcgcggcgagcgtgtcttcaatcaataccgcgaaataatgccggaaacagagatcgaaaattgttcccgtcgctttgcggctgttgccaccaatttaagtacgggacgtgaattatggtttactgaaggcgatctccatcttgctattcgcgcaagttgcagtattccaggactcatggcacctgttgcacataacggctactggctggttgatggagcagtcgttaacccaattcctatttccctcacgcgtgcattgggggctgatattgtgatagcggttgacctgcagcacgatgctcatttgatgcaacaagatttgctctcctttaatgtcagtgaagaaaatagcgagaatggtgattctctgccgtggcatgcgcgtctgaaagaaaggttaggcagcataacgacacgtcgggcggtgacagcgccaacggcaacagagattatgaccacttctatccaggtgctggagaaccgccttaaaaggaaccgcatggcaggtgatccgcccgatattctgattcaacctgtttgcccgcaaatatctacgcttgatttccatcgcgcgcacgctgccattgcggccggacagctggcagtggaaaggaaaatggacgaacttttgccgttggtacgcaccaacatttgaccagaatttttatctacacttaagttaattctgacaggcgcaggtggcaatagcatgccactattgagtaaagccagtcaggggagagaacatgacgcagccattggtcggaaaacagattctcattgttgaagatgagcaggtatttcgcagccttctggatagttggttttccagtttgggagcgacaacggtactggcggctgatggggtggatgcccttgagttgctgggaggtttcactccagacctgatgatatgtgatatcgcgatgccacgaatgaacgggcttaaactgctggagcatatacgtaacagaggcgaccagaccccagttctggtgatatctgccactgaaaatatggcagatattgccaaagcgttacgtctgggcgttgaagatgttttgctgaaaccagttaaagatctgaatcgcttgcgcgagatggtttttgcctgtctctatcccagcatgtttaatagccgcgttgaggaagaggaaaggctttttcgcgactgggatgcaatggttgataaccctgccgcagcggcgaaattattacaggaactacaaccgccggttcagcaggtgatttcccattgccgggttaattatcgtcaattggttgccgcggacaaacccggcctggtgcttgatattgccgcacttagcgaaaacgatctggcattttattgccttgatgtcacccgagctggacataatggcgtacttgctgccttgttattacgcgcattgtttaacggattattacaggaacagcttgcacaccaaaatcaacggttgccagagttgggcgcgttattgaagcaggtaaaccatttacttcgtcaggccaatctgccggggcagtttccgctattagttggctattatcatcgcgaactgaaaaatctcattctggtttctgcgggtctgaatgcgacgttaaataccggcgaacaccaggtgcaaatcagtaatggtgttccgttaggcactttaggtaacgcttatttgaatcaattgagccagcgatgcgatgcctggcaatgccaaatatggggaaccggtggtcgactgcgcttgatgttgtctgcagaatgagcaaacgataacgcgggctaaatttgcattacctgctaatgtcggctggtggtactatcgtcgccattcgtataagtaattgtcttaattatgctaactcgcctccttttcagaacttagccccttcggggtgctgatatactgggatgcgatacagaaatatgaacacgttcaaaacacgaacagtccaggagaatttaaatggctgccattaatacgaaagtcaaaaaagccgttatccccgttgcgggattaggaaccaggatgttgccggcgacgaaagccatcccgaaagagatgctgccacttgtcgataagccattaattcaatacgtcgtgaatgaatgtattgcggctggcattactgaaattgtgctggttacacacagttctaaaaactctattgaaaaccactttgataccagttttgaactggaagcaatgctggaaaaacgtgtaaaacgtcaactgcttgatgaagtgcagtctatttgtccaccgcacgtgactattatgcaagttcgtcagggtctggcgaaaggcctgggacacgcggtattgtgtgctcacccggtagtgggtgatgaaccggtagctgttattttgcctgatgttattctggatgaatatgaatccgatttgagtcaggataacctggcagagatgatccgccgctttgatgaaacgggtcatagccagatcatggttgaaccggttgctgatgtgaccgcatatggcgttgtggattgcaaaggcgttgaattagcgccgggtgaaagcgtaccgatggttggtgtggtagaaaaaccgaaagcggatgttgcgccgtctaatctcgctattgtgggtcgttacgtacttagcgcggatatttggccgttgctggcaaaaacccctccgggagctggtgatgaaattcagctcaccgacgcaattgatatgctgatcgaaaaagaaacggtggaagcctatcatatgaaagggaagagccatgactgcggtaataaattaggttacatgcaggccttcgttgaatacggtattcgtcataacacccttggcacggaatttaaagcctggcttgaagaagagatgggcattaagaagtaacatccgtatcggtgttatccacgaaacggcgttgagcaatcgacgccgtttttttatagcttattcttattaaattgtcttaaaccggacaataaaaaatcccgccgctggcgggattttaagcaagtgcaatctacaaaagattattgcttgatcaggaaatcgtcgagggatttaccttgctcatccattgcttttttgattacagctggagtacggccttggccagtccaggttttagtttcgccgttttcgtcaacgtagctatattttgccggacgctgagcacgtttagctttggtgccagatttaacggcagcaaggctattcagcagttcgttcgggtcaataccgtcagcgatcagcatttcgcgatattgctgcagtttacgagtgcgctcttcaacttcagcagcagccgcgctttcttcttcgcgacgttcgttaacaacaacttctaatttttccagcatttcttccagcgtttcaagtgtacattctcttgcctgcgcacgaagagtacggatgttgttcagaattttaagtgcttcgctcattgtagtaatctcaaacttatattggggtggtttgttgaggtaataatagagccttaaattcagttgtgcaatagccaggaatgtaaggaattcaaaattgttctttattttgtgccgccaataaatatcttttcataaaattagccagaaaagacgcggcatatagccctatttacaccgatgatttcgcagcacgtgaggttaaaacttcctgattcatgtcacattttatggggagattatcgtaggctgacgacctttcagtcttctgtattagttgtgtttacgagaattccctattaagcgaatgatgaaaagtagaacagtcgcaataagagcatggacttagtattgcactatctcctggaggtcaacagagggctattacttgcgcaacaggttaaagattgtgaatagttaccagcagtcatttacccgcttataacaagcgaggcagttgtaatgatagctcagaaggattatgcaaggcttcgtaagggagaacgcatatacccacttctgtgcatactgttgagctgaaaaactgacgaattatgataaactccagccaactttatttcatatcattgagggcctgtggctgatggcacagctatatttctactattccgcaatgaatgcgggtaagtctacagcattgttgcaatctagttacaattaccaggaacgcggcatgcgcactgtcgtatatacggcagaaattgatgatcgctttggtgccgggaaagtcagtagccgtataggtttgagtagccctgcaaaattatttaaccaaaatagtagtttatttgatgagattcgtgcggaacatgaacagcaggcaattcattgcgtactggttgatgaatgccagtttttaaccagacaacaagtatatgaattaagcgaggttgtcgatcaactcgatatacccgtactttgttatggtttacgtaccgattttcgaggtgaattatttattggcagccaatacttactggcatggtccgacaaactggttgaattaaaaaccatctgtttttgtggccgtaaagcaagcatggtgctgcgtcttgatcaagcaggcagaccttataacgaaggtgagcaggtggtaattggtggtaatgaacgatacgtttctgtatgccgtaaacactataaagaggcgttacaagtcgacagtttaacggctattcaggaaaggcatcgccacgattaataagaatttctttactgacagggtgagcagggcacttttatcctgtcagttcgttttacgcacttcttccgggctatatacccttctcggcagttttttaacgccgctatacgcctcacagggctcttaagcaccgacgttgacttgtgacctgtaaagtacaatatccctgtgtttaggcgttatacatcgtcgcaaatatgatgaaggctaatgctgtcggtttatggaaaagttgctttgggtaaacaaaaaatacggccccagaagggcaatgccgttcacttaagaggagcggcactatgtttcacaggataacgggtttttgatatcttaaccgacctcggccttgatggtcgggggcgttttgttatgaacaccacttccagagcaccccgaagatgctccagtcgtttcgggatggtccctggtgacgccgtgtttcccagctctatcatttctgatgcgatattcttccacgcaggcagtagccagtggcggttacaacccttctggttcagcgtcagcagcaggtcttcgctgtaaaaaagtttatcaaacaacgtaatagagttatccgggatggtggcgagcatggagtgggccagcacagtttcgctctgccggtaaggtgcggtcacggcattcagcagaatgtgacttcccaggttcattaaggccaccagacgcataaccgggtaggcgttctgccgcttagtggatgtgttggcagacccataatattcacgcagctcgggtttatcaggtgtcctgaactgtgcgccatcaatggcaaaaagttgcaggccgtgccagtcatccttcaggtaacgttccgcgcccctgtctgtgcggtctggcggaagagccattccactggggcggcccccacgcgctgacgcgcctgggtgacagcgctgcgggccagcaggttcatccccgcttcgccatccgcgctcaggttcagacggcgaacaacatcggtaattggctcattgcaccaccatccagataaccatgtcccccggtaaacgacggcggcgaacggtcgcatgagcagaaagcgtcaggcagtgttgtatccactcggtgggaaggtgttctgcaaatagttgtgcagagggcggaggcataagcggatggtcactgaaatcgagcagatcattgagaagtggcataagaaaacggctccctgttgtggaagccgttatagtgcctcagtttaaggatcggtcaactaatccttaactgatcggcattgcccagaaggggccgtttatgttgccagacagcgctactgattaagcggattttttcgcttttttctcagctttagccggagcagcttctttcttcgctgcagtttcaccttctacataatcacgaccgtagtaggtatccagcagaatctgtttcagctcggagatcagcgggtaacgcgggttagcgccggtgcactggtcatcgaatgcatcttcagacagtttatccacgttcgccaggaagtctgcttcctgaacgccagcttcacggatagatttcggaatacccagttcagctttcagcgtttccagccatgccagcagtttctcgatcttagcagcagtacggtcgcccggtgcgctcagacccaagtggtcggcaatttcagcataacgacggcgagcctgcggacggtcatactggctgaatgcagtctgcttggtcgggttgtcgttcgcattgtagcgaataacgttacaaatcagcagggcgtttgccagaccgtgcggaatatggaactgggaacccagtttgtgcgccatactgtgacatacacccaggaaggcgttcgcaaacgcgatacccgcgatagtcgctgcactgtgaacacgttcacgcgctaccggatttttagacccttcgtggtaggacgctggcagatattctttcagcagtttcagtgcctgcagagcctgaccatcagagaactcagatgccagtacagaaacataagcttccatggcgtgagttactgcgtccagaccaccgaaagcacacagggacttcggcatgtccataaccaggttggcgtcgacaatcgccatatccggagtcagcgcatagtctgccagcggatatttctgaccagtagcgtcgtcagttacaaccgcaaacggagtgacttcagaacctgtaccagaagtggtggtgacagcgatcattttcgctttcacgcccattttcgggaacttgtagatacgtttacggatatccataaagcgcagcgccagctcttcgaagtgagtttccggatgttcgtacataacccacatgatcttcgcggcgtccatcggggaaccaccacccagcgcgataatcacgtctggtttgaaggagtttgccagttctgcacctttacgaacgatgctcagggtcgggtccgcttctacttcgaagaagacttcagtttcaacgcctgctgctttcagtacggaagtgatctgatcagcataaccattgttgaacaggaagcggtcagtcacgatgagcgcacgtttgtggccatcagtaatcacttcatccagcgcgattggcagggagccacggcggaagtagatagatttcggaagtttgtgccacaacatgttttcagctcgcttagcaacggttttcttgttgatcaggtgtttcggaccaacgttttcagagatggagttaccaccccaagaaccacaacccagagtcagggaaggtgcgagtttgaagttatacaggtcaccgataccaccctgagacgctggggtgttaatcaggatacgcgccgttttcattttctgaccgaagtaagaaacgcgagccggttggttatcctggtcagtgtacaggcaagaggtatgaccgataccgcccatagcaaccagtttctctgctttttctaccgcgtcttcgaaatctttagcgcggtacattgccagagtcggggacagtttttcatgtgcgaacggttcgctttcatcaacaacggtcacttcaccgatcagaatcttggtgttttctggtacagagaagcctgccagttcagcaattttataggctggctgaccaacgatagccgcgttcagcgcaccgtttttcaggataacatcctgaacagctttcagctctttaccctgcaacagatagccgccgtgggttgcaaaacgttcacgtacagcgtcataaacagagtcaacaacaacaacagactgttcagaagcacagattacgccgttgtcgaaggttttggacatcagtacagatgcaactgcacgtttgatatcagcagtttcatcgataacaactggagtgttgcccgcgcctacaccgatagctggtttaccggagctgtatgcggctttaaccatgcccggaccaccagtcgcgaggatcaggttgatgtctgggtggtgcatcagtgcgttagacagttcaacagaaggttgatcgatccagccgatcagatctttcggagcaccggcagcgatagcagcctgcagaacgatatcagccgctttgttggtggcatcttttgcacgcgggtgcggggagaagataatggcgttacgggtcttcagactgatcaggcttttgaagatagcagtactagtcgggttagtggtcggaacgataccgcaaataataccgattggttcagcgatagtgatggtaccaaaagtgtcgtcttcagacagaacaccacaggttttttcatctttataggcgttgtagatatattcagaagcaaagtggtttttgatcactttatcttcgacgatacccatgccggattcggcaacggccattttcgcgagtgggattcgagcatctgcagcagccagagcggcggcgcggaagattttgtctacttgctcttgagtgaaactggcatattcacgctgggctttttttacacgctctacgagtgcgttaagttcagcgacattagtaacagccataatgctctcctgataatgttaaacttttttagtaaatcatctgctcgaatacgagagtatagtcagtgcggtgatgatttgcttaacctatgaaaatcaaaagcttactcgcgctcacactcactgtgatttactaaaagagtttaaacattagagttattatctctaatgcgtcacttccaggtggcgtaagcaagattactcacttctgggtactgattacgtgatccaaatcaaatttttgcaaagctgacacctttcagcatcgcttttcgccattatagctaacagttaataaattgtagtatgatttggtggctacattagcatgttttgcacaactagataacaataacgaatgatagcaattttaagtagttaggaggtgaaaaatgctgtcaaaaggcgtattgtcagcgcgtcttttcaaccttatttatggctaacattatccggcttttgcttcggagctaaccgtgattcagaccttttttgattttcccgtttacttcaaatttttcatcgggttatttgcgctggtcaacccggtagggattattcccgtctttatcagcatgaccagttatcagacagcggcagcgcgaaacaaaactaaccttacagccaacctgtctgtggccattatcttgtggatcagcctttttctcggcgacacgattctacaactttttggtataagtattgatagcttccgtatcgccgggggtatcctggtggtgacaatagcgatgagcatgatcagcggcaagcttggcgaggataaacagaacaagcaagaaaaaagtgaaaccgcggtacgtgaaagcattggtgtggtgccactggcgttgccgttgatggcggggccaggggcgatcagttctaccatcgtctggggtacgcgttatcacagcattagctatctgtttggtttctttgtggctattgcattgttcgctttatgttgttggggattgttccgcatggcaccgtggctggtacgggttttacgccagaccggcatcaacgtgattacgcgtattatggggctattgctgatggcattggggattgaatttatcgttactggtattaaggggattttccccggcctgcttaattaattcctttcaaatgaaacggagctgccatgctccgtttacttcgtcattatttttactttgttcccgcgcagttatcaaaagcaaaaggaataggtaaaaatattcttctcaaattacagttagttataaggatttccttaactgcttctcctcaccatcatgttattttcgccacatcataatcctgggcttgctgaagaataattgaaatgatattattaattccactgcctttggtagaggaaagtgctaaataataatcaattgttaaattattgtgcatttcactactggaactgtaatcagaaaagatagacatgcttagccaatctctatttgattgaattgaaagatgtttgttaaggcatggatgcaagctatagattctgatacggtcaataaaagagaattgcttaacaattttgcaaaatgtattggcgagtaagaaccgcatttggtactttccgggcaaccgccagacgattctttattggtaatgagaataattaacaattaaagagcgtcgcgaaagaataatgtgtctcgacaggggagacacagtacgaatcgacataaggtgatcgtctgaatcaccagaataaataaagtcggtgatagtaatacgtaacgataaagtaacctgacagcagaaagtctccgagcctgtgcagggtcccaatccgggattacacatgctggttaataccagtaattataatgagggagtccaaaaaacaatgaccaacatcaccaagagaagtttagtagcagctggcgttctggctgcgctaatggcagggaatgtcgcgctggcagctgatgtacccgcaggcgtcacactggcggaaaaacaaacactggtacgtaacaatggtagtgaagttcagagtttagatccgcacaaaattgaaggtgttccggagtctaatatcagccgagacctgtttgaaggcttactggtcagcgatcttgacggtcatccagcacctggcgtcgctgaatcctgggataataaagacgcgaaagtctggaccttccatttgcgtaaagatgcgaaatggtctgatggcacgccagtcacagcacaagactttgtgtatagctggcaacgttctgttgatccgaacactgcttctccgtatgccagttatctgcaatatgggcatatcgccggtattgatgaaattcttgaagggaaaaaaccgattaccgatctcggcgtgaaagctattgatgatcacacattagaagtcaccttaagtgaacccgttccgtacttctataaattacttgttcacccaagtactagtccggtgccaaaagccgctatcgagaaattcggcgaaaaatggacccagcctggtaatatcgtcaccaacggtgcctataccttaaaagattgggtcgtaaacgaacgaatcgttcttgaacgcagcccgacctactggaacaacgcgaaaaccgttattaaccaggtaacctatttgcctattgcttctgaagttaccgatgtcaaccgctaccgtagtggtgaaatcgacatgacgaataacagcatgccgatcgaattgttccagaagctgaaaaaagagatcccggacgaagttcacgttgatccatacctgtgcacttactattacgaaattaacaaccagaaaccgccattcaacgatgtgcgtgtgcgtaccgcactgaaactaggtatggaccgcgatatcattgttaataaagtgaaagcgcagggcaacatgcccgcctatggttacactccaccgtatactgatggcgcaaaattgactcagccagaatggtttggctggagccaggaaaaacgtaacgaagaagcgaaaaaactgctggctgaagcgggttataccgcagacaaaccgttgaccatcaacctgttgtataacacctccgatctgcataaaaagctggcgattgctgcctctagtttgtggaagaaaaacattggtgtaaacgtcaaactggttaaccaggagtggaaaacgttcctcgacacccgtcaccagggtacttttgatgtggcccgtgcaggctggtgtgctgactacaacgaaccaacttccttcctgaacaccatgcttagcaacagcagcatgaataccgcgcattataagagcccggcctttgacagcattatggcggaaacgctgaaagtgactgacgaggcgcagcgcacagctctgtacactaaagcagaacaacagctggataaggatagcgccattgttcctgtttattactacgtgaatgcgcgtctggtgaaaccgtgggttggtggctataccggcaaagatccgctggataatacctatacccggaatatgtacattgtgaagcactaatggcaatacgtggggcaggagtgtcctgctccacggtgtctgatttttatcgcattacagaaggcacaggccagaaggtagggcaatgttaaaatttattctacgtcgctgtctggaagcgattccgatgctatttattcttattactattagcttctttatgatgcgcctcgcgccgggaagcccttttaccggcgaacgtactttaccgccagaagtgatggccaatatcgaagcgaaatatcatcttaatgatccgatcatgacacagtatttcagctacctgaaacaactggcgcacggtgatttcggtccaagctttaaatataaagattatagcgtcaatgacttggttgcatccagttttcccgtttctgccaaactgggagccgcagcatttttccttgcggtaatactgggtgttagtgctggcgttattgccgcattaaaacaaaacaccaaatgggactataccgtgatggggctggcaatgaccggggttgttatccccagttttgtggttgcaccattattagtcatgatatttgcgatcattttgcattggctgccgggcggtggctggaatggtggggcgcttaaattcatgatattgccgatggtggcgttgagtctcgcttatatcgccagtattgcgcgtattacccgtggctctatgattgaagtattacactccaattttattcgtactgcccgggcgaaagggttacctatgcggcggatcattttacgtcacgcattaaaacctgctctgttacccgtgctctcttatatgggccccgcatttgtcggcattattaccggttctatggttatcgaaaccatttatggtttgccggggattggacaactgttcgttaatggcgcattgaaccgtgactattccttagtgttaagcctgaccatcctggttggtgctttaaccattttgtttaatgccattgtcgatgtgctatatgcggttatcgacccgaaaatccgttactgatactggagctcgcgatgatgttaagtaagaaaaacagcgagacgctggaaaatttcagtgaaaagctggaggtcgaagggcgcagcttgtggcaggacgcacgtcgacgttttatgcataaccgtgcggcggttgccagtctgatagtgctggtgctgatcgcgttatttgtaatcctggcaccgatgctttcccagtttgcctatgacgatactgactgggcgatgatgtccagcgccccggatatggagtccggtcactactttggtactgacagttccggtcgcgacctgcttgtgcgcgttgcgattggcgggcgtatcagtctcatggtcggtgttgctgcggcactggtggctgtggtcgtcgggacactttatggtagcctttccggttatctgggcggtaaagtggatagcgtaatgatgcgtctgctggaaatcctcaactccttcccattcatgttcttcgtcattttgctggtgacctttttcggtcaaaacatcctgctgattttcgtggcgataggcatggtttcctggctggatatggctcgtattgtgcgtgggcaaaccctgagtctgaagcgcaaagagtttattgaggcggcacaagttggcggtgtaagcacaagcggcattgttattcgccacattgtgccgaatgtactcggtgtggtggtggtctacgcaagtcttctggtgcccagcatgatcctctttgaatctttccttagcttcctggggttgggtacgcaagagccgttaagcagctggggtgcattgctgagtgatggcgcgaacagcatggaagtctctccatggttattgttgttcccagcgggattcctcgtggtgacgctgttttgtttcaactttatcggcgatggcttgcgtgatgccctcgacccgaaagatcgttaaggagtgcagccatgagcgtaattgaaactgcaactgtgccgctcgcacaacaacaggctgacgcactgctgaacgtgaaagatttgcgtgtcacctttagtaccccggacggcgacgtcacggcggtcaatgatttgaatttttccctacgtgccggagaaacgctgggtattgtaggtgagtctggtagcggtaaaagccaaactgcatttgcgttgatgggcctgttggctgccaacggacgtattggcggaagcgcaaccttcaatgggcgtgaaatcctcaatttgccagagcatgaactcaataaactgcgcgctgaacaaatcagtatgatttttcaggacccaatgactagcttgaatccctatatgcgcgtcggtgagcagttgatggaagtgctgatgctgcataagaacatgagcaaagctgaggcgtttgaagagagcgtgcggatgctcgatgcggtaaaaatgccggaagcgcgtaaacgcatgaaaatgtacccgcacgaattttctggcggcatgcgtcagcgagtcatgattgcgatggccttgttatgtcgacctaagctgctgattgcggatgaaccaacaactgcgctggacgtcaccgtacaggcgcagatcatgacgctattaaatgaactgaagcgggaatttaataccgccatcattatgatcacccacgatcttgtcgtggtggcggggatctgcgacaaagtgctggtaatgtacgccgggcgcacgatggaatatggcaacgcgcgcgatgtcttttatcaacccgttcatccttattctatcggtttgctcaacgcggtgccgcgtctcgatgcggaaggtgaaacaatgttgaccatcccgggtaatccgccaaacctgctgcgattaccgaaaggttgcccgttccagccacgttgtccgcatgcgatggaaatttgtagtagcgcaccgccgctggaagagtttacgcctggccgtctgcgtgcttgctttaaaccggtggaggaactgttatgaatgctgtaactgaaggaagaaaagtcctccttgaaatcgccgatcttaaagtgcactttgaaatcaaagatggcaaacagtggttctggcaaccgccgaaaacgctcaaagccgtcgatggtgtcactcttcgcctgtatgaaggggaaacattaggtgtggtaggggaaagcggatgcggtaagtccacctttgctcgcgccatcatcggtttggtcaaggcgaccgacggtcatgttgcctggttaggtaaagagttgctgggcatgaaacccgatgaatggcgtgccgttcgcagtgatattcagatgattttccaggatccgttggcaagcctaaacccgcgtatgaccatcggcgagatcatcgctgaaccactgcgtacttatcatccgaaaatgagtcgccaggaagttcgcgagcgcgtgaaggcgatgatgctgaaagtcgggttattgcctaacctgattaaccgctatccgcatgagttctctggtgggcagtgccagcgtatcgggattgcgcgtgctcttattcttgaaccgaagctgattatctgtgatgagccggtgagcgcgctggacgtgagtattcaggcacaggtggtcaacctgctccagcaattgcaacgtgagatgggattgagtttaatttttatcgctcatgacctggccgtggtaaaacacatttccgatcgtgtgttggtgatgtatctcggccatgcggtagaactggggacctatgatgaggtctaccacaatccactacatccttacaccagggcattgatgagcgcagtccccatacctgatccggatctggagaagaacaaaaccatccagttactggaaggggaattaccgagcccgatcaacccgccttccggttgtgttttccgtacccgttgcccgattgccggtccagagtgcgccaaaacacgtcctgttctggaggggagtttcagacactccgtttcttgcctgaaagtcgatccgctttaaaaacaataagggctgacagttgtcagccctttttcacgctaaaagcgattatttattcccgccagatgatatggcaaagtttgtgatctttttcgcggcataacagaatgcgggcaaaaacatcgttgatttcaccatcttcactgtccgccagaccaatcaccacttcggcaaaaaagtccgggttcaaatcgaaatcaacatgttcctgccagtcttccgccggatcgaataactccgcgccgccgcgctcttcaaactgaagattgaacagcaggacatcagctggatcgagattgtcggcagccagttcgagaaaaatatcgtaggcctgttcaagcgtttcatcttcagtcaggcgattgtttagatccatatccatagttactacctgtttaacctctgttggcgacgttttacagcaacggactgaagaagtaaaacagtcgctcggcgacacgttgccataatggacgttttagccataaacgggcatcgagcagacgactacggctaatataatcgtcctgaacggcggcgaggtcagcaccaaaacctttatcgtcgattgccagggtaatctcgaaatttagccacagactacgcatatcaaggttaactgtgccaaccagacttagttcgccatcgaccagcacgctcttggtatgcagtaacccgccttcaaactgataaattttaaccccagcagccagcagttccgtaaagaatgcgcgactggcccagccgaccagcatgctgtcattttttcgcggaaggataatactgacatccaccccgcgctgcgccgccgtgcaaatcgcatgaagtaaatcatcgcttggcacaaagtagggcgtggtcatgatcaaatattcacgcgcgctataagccgcagtcaataatgcctggtgaatgagatcttccggaaagccggggccagaagcaattgtgtgaatggtgtgaccgctggcctgttcaaacggcataatattgacatctggtggtggcggcagaatacgttttccggtttcaatctcccagtcgcaggaataaataatccccatcgcggtggcgatagggccttccatacgcgccatcagatcaatccattgccctacgcccgcatcttgtttgaagtagcgaggatcgaccatattcatgctgccggtgtacgcgatgtaattatcgatcatgatcatcttgcgatgttggcgcaggtccatacggcgtaaaaacacacgcatcagattgacctttaaggcttcgaccacttcaataccggcattacgcattagctcgggccacgggctgcggaaaaaagccacactcccggcggagtcgagcatcaatcggcaatgaatgccgcgtcgcgcagccgccattaaactttcagccacctggtccgccatgccgccgggctgccagatataaaacaccatctcaatattatggcgcgcgagctggatgtcgcggattaacgcctgcatcacatcatcactctcggtcatcagttgtagctgattccctttgaccccagcgatcccctgacgacgctcgcaaagcttgaataatggcgcagcgacactgctattttcttcggcgaagatatgcttacaggctttaaggtcgttaagccattttgcggtggaaggccacatcgctctggcgcgctcagcgcggcgtttgcctaaatggagctcgccaacggcaagataggcaataattccgactaacggcagaatgtaaataatcaacagccaggccatcgcggagggaactgcgcgtcgtttcattagaatgcgtaaagttacgcctgcaatgagcaaccagtatcccagaatggccaaccaactcaccaacgtataaacggttgtcatagattagaaatccttttgaaagcgcattgttatgagtttacgcatatggattcatctggcaaataaaaacgcgggaaaagcactggtcagcgtcgggggtgggggtataatgaccattctgttattgcatagagtagttaacatgaagcggagtagaacggaagtggggcactggcgcatgcagcgtcaggctagccgacgtaaatcgcgttggcttgaggggcaatcgcgccgaaatatgcgtatccacagcatcaggaagtgcattctaaacaaacagcgtaactcgttattgtttgcgatctacaatatctaaatgtactgggcaccattgcggtgcccaataagtttactcttccgtctttaaactttatttttgcgcgctttctttactgtcagctttcgtttctagttcatcgttatcgctgaaaataccatgaccactgttcaacaacatactaacgagcatatcattattaatctcttcaccatttaaaactcgcgccagaatttcgctgccaaacagttgcggactgagaatgatatccggatgtaccatcttaatcttattcaggtttttgctatcactgacggcgagaactgttttgacatcactgctcatatcttttgcgctgagtacaacaaacgcgttatctgcatcgttatcactcagcgccagaatggcccggcaacgatcgattcccgctttctttaatacagaactgtcattactgtcaccggggataacatcagcattatcgcctaagcgttgctcaagttgcttgatatcatcttcaggcaagttgctgataaccgttacgttttgtccgcgttgattcagttgcaggatcgtattgatggcgagaatgctatgtccgcaaacaataaaatgatctttacgatgcattgtatgattgtttccttttacaagtttgttgaatcccccgcggataagcggaccaaaaatactggtcatagatgtggcaaaaacggtaatgccggaaataatgacgctaatagtgaacaatcgtgcactttcagaaacagggacaatatcgccatagccgacggtactcatggtttctatgctaaaatagaacgcggtcatcaaactttctattcgcggattaaaaccttcgcttaaataaagcgcaccgtaggtactgtaaaacagtaatgtcgtgaaactaataaatgcaaaaattgtcccggctgcggcgctactgtgggagaagtctttgcgcagtatcagcaaaaacaccagcgtaaaaatgcaaaatccaatactaaatttcagccagggataaaaatgcagggtgtaaattagcgctatcaacaacaaaatgatactgattgcccatgcgagctttgcccggaacagtaagccaatggagttcaggacaagaaagacgccgagcataaagagtggggcgtttgccagcaaggagagatccaactcactaaatgctttgatatggaaaatatcaagcaaattgacgctcataccatagattgttttaaaaataagcaatccatttaaaaagacggccagcgcgagaatgtcgtgccgaagggtcacccataaatttgttgctgtttgtttgaatgtagcccagtgactcactgatacctctgtaaccacaattttgtttaattatcttagcgtgcacattttctgaacatacatgcagcgcgtgaatgtgttaaacaatagtagatgactttatccgcagtaatcaaaggatttgagcgagcaactgtacctcaggaaaggtcatttttcctgaatatgctcacatcatataaagaaatacagataaagttattatctgcttgtggtggtgaatgcactgaccggctataaggaaaggccaaacaagaacacggttgcaaaaaccgtgcccttaaatattgaatctctattcagaacactttcttaaatggtttcacactaacgtgttcatagactcctgccgctacgtacgggtcagcatcggcccaggcctgagctgcttccaggctttcaaattcagcaataacggtactgccagtaaatcccgcagcccctggatcgttactgtctaccgctggcattggaccagctgtcaacaaacgaccttcatcatgcagtaactgtaaacgtgctaaatgtgccggacgaacggaaaggcgtttttcgaggctatcagctttgtcttgagcgtaaataacatacaacacgggcacaactccttgttcgggaaagttgtaaagtacgttatttgaaagggcgaagatctgcaacggaaagatgatgtctttgttaaggccatgcataaagtaagggtaattacgccaaaaatgacattttcactgatcctgatcgtcttgccttattgaatatgattgctatttgcatttaaaatcgagacctggtttttctactgaaatgattatgacttcaatgacccttgatttacctcgccgcttcccctggccgacgttacttagcgtctgcattcatggtgctgttgtggcgggtctgctctataccagcgtacatcaggttattgaactacctgcgcctgcgcagccgatttctgtcacgatggttacgcctgctgatctcgaaccgccacaagccgttcagccgccaccggagccggtggtagagccagaaccggaacctgagccgatccccgaaccgccaaaagaagcaccggtggtcattgaaaagccgaagccgaaacctaagccaaaaccgaagccggtgaaaaaggtacaggagcagccaaaacgcgatgtcaaacccgtagagagccgtccggcaagtccgtttgaaaatacggcaccggcacgcctgacaagtagtacagcaacggctgcaaccagcaagccggttaccagtgtggctagtggaccacgcgcattaagccgtaatcagccgcagtatccggcacgagcacaggcattgcgcattgaagggcaggttaaagttaaatttgacgttacgccggatggtcgcgtggataacgtacaaatcctcagtgccaagcctgcgaacatgtttgagcgtgaggtgaaaaatgcgatgcgcagatggcgttatgagccgggtaagccaggcagtgggattgtggtgaatatcctgtttaaaattaacggcaccaccgaaattcagtaagcagaaagtcaaaagcctccgaccggaggcttttgactattactcaacaggtaaggcgcgaggttttccttcaggatcaaccgcgacatacttaaataatgcttctgtcgctttatagcgttgcccaattggttcagacgctacttttttcacccacacttcaatattaatgctgacgcttgtcgtccctttctggacacagcgtgcatagcagcacaccacatcgccgaccgcaaccggccgtaagaaagtcattccttcaacccgcacagtcactacgcgaccgtgggcaatttcttttgccagaatagcgccgccaatatccatttgactcattaaccaaccaccaaagatgtcaccattggcattggtatcggcgggcatggctaaagtacgtaaaacaagatcgccctgagggacgttatgtgttgtagacatggtaaaaccgacttaaaaggaaaatcacaggcgcgatgctactatgattttcctgaggagaacagaggagatacagcgccagccccgaaggactggcagtctggttaggatttatcttcctgcggcatgtggcggtagatatagataccgcttaacaatgtgaagattaaggtaagggcggtcaggccaaagactttaaagttgacccaaatattttgcggcagccagaatgcgatgtagatgtttgccagaccgcaaaggataaagaaaacagcccaggccagattcagcttgctccataccggttgcggcagcgtgagttctttacccagcatccgctgaattagcggctttttcatcacccattggctgactaacagggctcccgcaaatagagcataaatgacagtaaccttccatttaataaactcatcattgtggaagaacagcgtcaagccaccgaagacgaccaccagaacaaaagtgatcagggccatcttctcaaccttacgaaagcgaacccagctatagataagcacaatcgccgtggcgacgatcagcgccgcagtagccgcatagatgtcataaatcttgtaaaacgcgaaaaagacaaccagcggtaaaaaatcaagaaactgcttcattttacgattccgtaatcaaatgcttaaggttattggcgaatcaacatatacaggcggaacagatagatgagcaatatggcactaatcaggttgctcaaggtgttcgccagtacggcaccaatttccggggttaatgcggcaaaagaagaggcaaaaagcagcaacagtgtttttgccagcaaccagctcagtactgcgggtgccaccagacgcatattcgcccaagtcagccgcatactgctacgcatgctggcaaaaacgcccattttgtcctgtaccaacatcaccggtgccagggccagtaaaatggccatgataattcccggaacgaccaccagcatgatgccaatctgtactaaaagggtagtcagaaaaatcagaataaataactttggcaatatcggcgcactggcaccaatagctcgcagcgcactgactctctgacccgcagacaccagctggataattaatattacgcctccggcgagaatggcgttaccgattaatccactaaaagtggacgccgcactagcctgcagcaaaatttgttgctgttccggactcatattctgaaccaggtcgaacaacccactactgccgctaacgggcacgcagtcattgagctgcgcaagctgtgcatcactgggactgaaagcatgccctaacaccactgtgataaacgcacatagcaagcttaccaacagaatggtcataaattgattacggaagaaatttccggtgtcacggtatacggactgcgccgtgatagacatgcactctccttgagttttatgcaggtgttaattagcgggcaattgtaccctggttaagcctcgggtggcagcatcaggtcttgtatggaaaagcatatctttgtaaagcggaggtaattgctggccttcaggcatgggcaaatcgcggcaagtggcgaccgagttaatatttgcgtagcgaaaatatttaaaaattgatttaaatcacattaaccaggattctcaatgcaacttctaaattaatccagatcaataaagggtgaattatcatatgtaatgtgatctatgtaggatcatttgttactccaatgtaggtatattcgtcacgtttttataaccataacgacggagcggatatgaaaaagttaacagtggcggctttggcagtaacaactcttctctctggcagtgcctttgcgcatgaagcaggcgaattttttatgcgtgcaggttctgcaaccgtacgtccaacagaaggtgctggtggtacgttaggaagtctgggtggattcagcgtgaccaataacacgcaactgggccttacgtttacttatatggcgaccgacaacattggtgtggaattactggcagcgacgccgttccgccataaaatcggcacccgggcgaccggcgatattgcaaccgttcatcatctgccaccaacactgatggcgcagtggtattttggtgatgccagcagcaaattccgtccttacgttggggcaggtattaactacaccaccttctttgataatggatttaacgatcatggcaaagaggcagggctttccgatctcagtctgaaagattcctggggagctgccgggcaggtgggggttgattatctgattaaccgtgactggttggttaacatgagtgtgtggtacatggatatcgataccaccgccaattataagctgggcggtgcatagcaacacgatagcgtacgcctcgatccgtgggtgtttatgttcagtgcaggatatcgtttttaattccgcacaaaaacgaccccgtaatatacggggtcaataaggacatggtataaagggtattatttcttcgcttctacgccatcagtttcagagcgaattaaaaatttctcagttgtttgcggaatattctgaatcagccagtcggccatttgcttttcctcatttaaaatcgcttcgatggttggaatactagctgtatcaccggcattttttgctgctgctaatagactggtgtaacaggcgatttcaaattgctcgaagacatatccgctaatagagcctttgactatttcatcagaagggaatataccaccgatactctgcccaagcgcagccattttactcatggaatctttaatgacactacgactaatgtcattacgatcaagaatagtttccagttgaacaatctggtttttggtttcactaagatgttgttcaatacgagcgcgtagttcaggataattatctatacggctggccatggattcaagcatagattcggcttgcttttccattgcgtgggcgtcacgtaaccagtcatgataatgttcaatacgattcatgaaaatgtcctctttataaaatgactaaaagttaaaattcatatttcaggctttattttcggctttcttatttacgttattaatggccagatcagtcagtttgatgtcggtggccttttcttcttccagggtttctttcagaagcttcgctgctttacggtaacctaattgttcagccagcgtcgctaatgtcccgtaactggcaatctcataatgctcgactttctgtgctgcggcaatcagtgcggcatcacgcacttcgtttttctcggtactttcgatgacctcattagcttcttcaataagaccttccattgccacacatttcatgcgcttaattttcaggttgctttcggactccacaacttgatcaatacgttcaatctgtccatgagtttcctcgaggtgcgcatgaaaagcctgacttaatttttcattacttgttgctcttgcgagttttgccagtgcccgggttaattgtttttctgcgctgtaggtatcactaagcaggtgaataaatacatcttcaatggtcttcatattcatatttttctccagtgaaatcactgcgagccatacggcccgcagatgcaattatctttatcagctgatattaataattaacggtgaatcaggatttgccacttttattaccaccgctttgttgaccgccttttttacccgcttcagatgcgcgttgcggatcatttttaaaattaccgccgctatgctgaccgcctttacggcctgcgtcggatgccttctcacggtcttcggcgaaatttccactaccaccacgatgttcggccatgttatttctcccgttgcgttgcattgtttcattaatatgagtgttgtgtgtcgacactcattaaaattagtcgctaatgagaattagtcaaattaagcgcaacgagaagatagagggaaaatatattttgaggaacattctggatatattaacaattacctgaggaataagtgacttagagaaaattattgattttactggtgttatgttgcgggattaatttgtttgattatattactgttgggcggaaaaatgacgtaagttgacgttcgaccggggtaagcgaaacggtaaaaagataaatattaaatgaatttaggatttttccggcttcattaaagaaagttaaaatgccgccagcggaactggcggctgtgggattaactgcgcgtcgccgctttcatcggttgtacaaaaactttcagtgccgccagcattttctctggctcattaatatgttgctcgatgattttaacaatggcgctaccagaaatcgcgcccgcagctcctgcatcaatcgctgcttttacctgatccggggcggaaataccaaatccctgcaatggaggtgcagcgttgtactctttcagcttcgcaaccagatgattgaggggtaacgcggcgcggttttctgcgccggtcacgcctgctcgactcagcaaataggtgtaaccacgaccgtaagaggctatctggcgcagcaggtcgtcatcggcatttggcgggcagatgaagataggtgcgacattatgacgcaacgcggcctggcggaagggcgcggactcttcaactggcacatcggcaaccagcacgctatcgacgccgactttttcgcactgggcataaaactcatcaatgcctttgttaaacaccagattggcatacatcaacaggccaatgggaatggtcgggtgtttctggcgaatcagtgccagcatttcaaaacattgtgccggagtcacacctgccgcaaaggcgcgcagagtggcgttttgaatcgtcgggccatccgccagtgggtcggagaaggggatacctaactccagcgcgtcagcaccggcttcaattagcgtatcgataattttcaaactctgctcaatgcccggatcaccgagcgtgacgaaaggaacgaatgcgccttctttgcgctccttcaactgggcaaacagagattcgtagcgttccatcagatttcccctcgtgctttcaaaatatcgtgaacggtgaagatgtctttatcgccgcgaccggaaaggttaaccaccagtagctgctctttatccgggttttcgcgcatcattttcaacgcatgggccagggcgtgggaggattccagcgccgggatgatcccttcgtgcaggcacagcgttttgaaggcttcaagggcttcatcatcggtaatagacacgtaatcagcgcgtccagtgctgttaagatacgcgtgttgtgggccgacagacgggaaatccagtccggcggagatggagtaagattcttcaatctgcccgtcttcggtttgcatcatcggcgctttcataccgaaatagatacccacgcgaccatgttttagcggtgcgccgtgctcgccagtttcgataccgtgaccacctggctccacaccaatcaggccgacgttggtttcattgatgaaatcagcaaacatgccgatggcattgctaccgccgccaacacaggcgataacggcatccggcaggcgaccttctctttccagaatctgcgctttggtttcttcgccaatcatccgctgaaactcacgcacaatggtcggataaggatgcgggccagctgcggtgcccagcatatagtgcgcggtttcgtaactaccggaccagtcgcgcagcgcctcgttacaggcatctttcagcgtcgcggaaccgctatgcaccgggatcacttccgcacccattaagcgcatacgaaaaacgttagggctctggcgttcaacgtctttggcacccatataaatacggcatttcaggccgagcagggcgctggcaagggcgctcgccacgccatgctgaccggcaccggtttcggcgatgatttcggttttacccatccgcttcgccagcaacgcctgccccagcacctggttagttttatgcgcgccgccgtgcagcaaatcttcacgcttgagatacagcgtggtgttcgtcccggctgtaatgttctggcatttggtcagcgcggttggacgcccggcatagtttttcagcaggtcgttgaactgagcctgaaattcaggatctttttgcgcactgacaaaagcttcttccagctggcgcagagcaggcatcaggatttgtggcacgtacatgccgccaaactcaccaaaataggggttaagtaatgttgtcattgttcctttccttaatatgcgcgcagcgtctggaaaacgctggccaaaagacgtgcgtctttgatgcccggttggctctctacagcagaattaaaatcaagtccggcgcagccggtttgtgccgcttccacgcagttatctgcgcctaagccccccgccagcagaacgttgccaaggctttgaccatttaatagactccagtcaaaacgttgcccgcttccaccctggccgttgtctaaaacatatttatcaacgtgctgaaactcgcgggcgggcagggtttcaccgacgcttaatgctttccagatggcaacatgtgctggcagagcttcacgcagcgtatcgatatacagctgttcttcattaccatgcagttgcactgccgccaggcttaacaccttagctttgtccaccacatcggcaatatcgtgattgcggaacacgccaacatactgcaacggtgccgcagccatcacttcctgcgcctgttcaacgttgacgcaacgcggacttgtcgcaacaaaaatcaacccaccgtaaatcgcgcccgcgtcataagctgctttagcatcttgcccacgcgtcaggccacatactttattctcacccagcaacacccggcgcacggcggcgtgcaaatcgtcatgggccatcaacgcgctaccaatcagaaaaccgttagcgaagtggcttaactcgcgcacctgagcgtaagtattgatgccggattcgctgattaccgtcacgttgtgccccagtttcggcgcaagctcgcgggtacggttgagatcaatgctcaaatcacgcagatcgcggttgttgatgccaacgacctttgctcccaatgcaatggcgcgctcctgttcctcttcattactgacttcggtcagcacccccatctccagactgtgagcgacggcggcaagctggcgatattggtcgtcatccagtacactaagcattaataagcaggcatcggcctggtaatagcgcgccagatagatctggtaagggtcgataatgaagtctttacataaaatcggctgcggggcgatttggctgacgatggggaggaaattaaagctcccctgaaaatatttctcatcagtcagcacgctaattgcgctagcgtaatgtttataaatggcggcaatgcgtgctggatcgaaatcatcacggatcacgcctttactcgggctcgctttcttgcactccagaataaacgccgtgcgcgcaccctgtagcgcatcataaaaatgtcgcgtgctcggctgaacctcattctgaaaactggccagcggttgctgctgtttgcgggcttctacccaaatcgccttgtctgcgacgattttcgctaaaacggtttgcatcatttaccctcgtgccgccagtgcggtgactctgtcgtaagcggaaccactgcgcagtacctcaagaacggtttgcgcattggcttgcagatcttcatggccatgcaggcgcattaacatggcgacgttcgcagcgacggctgcttcatgggcggcgtcgcctttaccttgtaacaaacgtgttaaaatgtcacggttttcttccggtgttccgcctgccagttgctcctggtggtagggtgtcaggccaaagtcttctgcggtgagctgatagcttttaatttcgccgtcatgcagttcggcaacgattgtcggcgcgtgtaaactaacttcatccatcccgccgctgtgcaccaccgccgcgcgttgataccccagcacgcgcaaggtttcggcaatcggcagcaccagttccggactataaacaccaattaacgccagcggcggatgcgccgggttaatcaatggccccagcacattgaacagggtgcgggttttcagttgctggcgaaccggcatcgcgtggcggaatccggtgtgatacttcggcgcaaagaggaaacatacacctaactcatccagcgcctggcggcttttatcggcgttcatatcaagattaataccgaacgccgccagcagatcggagctaccagatttactggagacgctacggttgccgtgtttcgccactttcagcccacaggccgcggcgacaaacgcactggcggtagaaatattgatactgttgctgccgtcaccgccagtaccgacgatatcagcaaacagataatccgggcgcgggaacggcgctgcgttttccagtagcgcggttgctgccccggcgatctcgttcgggtgctcaccgcgaattttcatgctcaccagcgccgccgccagttgttccggcttcagctcgccacgcaccaccgcactaaacagctggtggctttcttgttggctaagcgtctgcgcctgatacagtttttccagaatcggttgcagcgtgttggctggctctagtttctgctgcgcccaggccagcgtttgttccagcaggcgagcgccctgggtggtgagaatggattccggatggaactggaatccacaaacgcgatccgcatcgtgacgtactgccatcaccatgccattaaaatgggcgttgatggttaaaccggccggaatgttactgccaaccaggctgtgataacgcgccaccggcagcgggtttgttaatccggcaaacatcgcctgaccgtcatgttcaatgctggaggctttaccgtggagaatttcgcccgcctgaccgacatagcccccgtaagcttcgacaatcgcctgatgtccgaggcaaatgccaataatgggcagcttgccacgcaagcgggtgaggagttccggcatacaaccggcttcgctcggcacaccggggccaggagaaagcatcagcaccggattgctcatggtcgccaggcgttcaattaaggtttgcgccggaatatggttgcggtaaatcaccacgttatgcccattgctgcgcaactgatctgccaggttgtacgtaaaagagtcgatattatcgagcagcagaatgtcagccatcagaaagtctcctgtgcatgatgcgcggtggcaatagcgcgcagtacagcgcgggctttgttacgggtttcgtcggcttcgctctgcggaacagaatcaaggactacaccagcacccgcttgcacggtggcgataccgttttccaccagcgcgctgcggatcacaatgcaggtgtcgagatcgccatgcgcggtgaaataacctaccgcgccgccgtagctgccgcggcgacgaccttccgcctcggcaattaactgcatagcgcgtactttcggcgcaccgcttaacgtccccatattcatacaggcgcgataagcgtgcagggcgtcaagatcgtgacgcagttcgccgactacgcgagagacgaggtgcatcacataggaataacggtcaactttggtgagatcggcgacgtagcggctgccgggggtgcaaatgcgtgccagatcattacgggcgagatcaaccagcatcagatgttcagacagctctttatgatcggtacgcatttccagttcaatacggctgtcgagatctctgtccagactaccatcggcgcgacgaccgcgtgggcgtgttccggcaatcgggtagatctcaatctggcggctggtggcatcatacttgaggctgctttccgggctcgcgccaaatagggtgaaatcattatcctgcataaaaaacatgtacgggctgggattactctttttcagcacgtaataggccgccagcggactcgggcagggcagagagaaacggcgagatggcaccacctggaaaatttctccagcgcgaatcgctttttgcaacaaacgcactacgccaccgaactcttcatcgctctgattacattcacaacgcatatgcggcacggaaaccactggcagcggcggcgcggcttcggtcagttgctgacgtagttcgttcaggcgagcagtgagacgttgtttttcttcttcattcggagcaaacaggctggcctgaatacgggtgctttttttctgatggtcaatcaccatcagcgtttcagcgagataaaaacagaaatcagggcagttattttccgcactcagttgcggtaaatcttcaaatcccgccacaaggtcataagagaacaggccgccgaagaacatggcttctcgttcttccttcggtacattcaacagattctgcaataaacggaaagcgtcaaaaacgctaagggagcataagcgggcgtcttcatccagcagtggactgacaggggggaagcgcagcacacggcagtttggactttgttcactttccacacccgcaggcagggcgttatccagtagtgccaggagggcttcgccgttgccggaaagtgcctggattgtgacagtgtcacctaaagctgtaatgcgcagcgcactgtctaccagcagcaggctttttaaatcatctttgctgtcgatatctgcggattccagcagcagcgttgccggacgatccccacacaactggtgaaaaagcgcggtgggattgtcgcgataagcgccttcgcaggttagcagttcgagagtcggtttttgtgtttgcattgttattctctaattttgttcaaaaaaaagcccgctcattaggcgggctgggtatctgattgctttacgcatggtgaatacactgcccgtttcaggaagtgcgccaccaacctttcagtacgaaaattgctttcattgtcgataccctttttacgtgaacttgcgtactagttaactagttcgatgattaattgtcaacagctcatttcagaatatttgccagaaccgttatgatgtcggcgcaaaaaacattatccagaacgggagtgcgccttgagcgacacgaattatgcagtgatttacgacctgcacagccataccacagcttccgatggctgcctgacgccagaagcattggtgcaccgtgcagtcgagatgcgcgtcggcaccctggcgatcaccgaccatgacaccacagctgcaatcgcgccagcaagagaggaaattagtcgtagcggactggcgttgaatcttattcccggcgtggaaatttccacggtctgggaaaatcatgaaattcatattgtcgggctgaatattgatattactcatccgctaatgtgtgagttcctcgcgcagcagacagaacggcgcaatcagcgggcgcagctgattgccgaaagacttgaaaaagcgcaaatacctggggcgctggaaggcgcacaacgactggcgcagggcggcgcagtgacgcgcggtcattttgcgcgtttccttgttgagtgcggcaaagccagtagtatggcggatgtctttaaaaagtatctggcgcgcgggaaaaccggatacgttccgccacagtggtgtacaatagaacaagctattgatgtcattcatcattctggcggtaaggcggtgctagctcatcctgggcggtacaatcttagtgctaaatggctgaaaagattggttgcgcattttgccgaacaccacggtgacgcgatggaagtcgcgcagtgccagcaaagccccaatgaacgtacccagctggcggcccttgcgcgtcagcatcatttatgggcaagtcaaggatctgattttcatcagccatgcccgtggatcgaactgggtcgtaaactctggctgcccgcaggcgttgaaggcgtctggcagctatgggaacagccgcagaacaccacagagagggaattatgagccagtttttttatattcatcctgataacccacagcaacgtctgatcaaccaggcggtggagatcgtgcgtaaaggcggggtgattgtttatccaactgattccggctatgcgctcggctgtaaaattgaagataaaaacgcgatggagcgtatttgtcgtattcgccagctgccggacggtcacaactttaccctgatgtgtcgcgatctttctgaactcagcacctatagttttgttgataacgttgcgtttcgtttaatgaaaaacaacacgccgggcaactataccttcatcctgaaggggacgaaggaagtgccacgccgtctgttgcaggaaaaacgcaaaaccatcggtatgcgtgtgccttctaaccctatcgctcaggcgttacttgaagcattgggcgaaccgatgctttccactagcctaatgctgccaggcagcgaatttaccgaaagcgacccggaagaaattaaagatcgtctggaaaaacaggtagatttgattattcacggcggctatctcgggcagaaaccgacaacggttattgatcttaccgatgatacgccggtcgtggtgcgtgaaggcgtaggtgatgtgaagcctttcttataacaaattgcgttccacggatggaagactatggcagggaagtttcgctgcattttgctgttgatagcagggctgtttgtaagttctctaagttatgcagaaaacacggagatcccttcttatgaagaagggatcagcctctttgatgttgaagccactctgcaaccagatggggtgctcgacatcaaagaaaatattcattttcaggcgcgaaatcagcagattaagcacggcttttatcgtgatttaccacgactatggatgcagcctgatggggacgctgcactgctgaactatcatattgttggcgtcacccgtgatggtattcctgaaccctggcatcttgactggcatatcgggttaatgagtattgtcgtgggcgataaacaacgtttcttgcctcaaggcgactatcattatcaaattcattatcaggttaaaaatgctttcctgcgtgagggggattctgatctgctaatctggaacgtgaccggtaaccactggccgtttgaaatttataagacccgtttttctctccagttctctaatattgcgggtaatccatttagcgaaatcgatctttttaccggagaagagggcgacacatatcgtaatggccgcatccttgaggacggaagaattgaatcccgcgatccgttttatcgtgaagatttcacggtcctctaccgctggcctcacgctttacttagcaatgccagcgctccgcaaacgacgaatattttcagccatcttcttttaccctccacgagtagcttgttaatttggtttccgtgtctgttcctggtttgtggatggttatatctctggaagcgcaggccgcaatttacgccggtagatgtgattgaaaccgatgtcattccgccagattacacgcccggcatgttacgtctcgatgcgaagctagtttacgacgataaaggtttttgtgccgatatcgtaaatctgattgtgaaaggaaaaattcatctggaagatcagtctgacaagaaccagcaaatcctgattcgtgttaatgaaggcgcgaccagaaataatgcggtattactgcccgcagagcagttattactggaagcgttatttcgtaaaggcgataaggtcgttcttacggggagacgcaacagagtcttacgcagggcatttttacggatgcagaaattttatctgccgcgtaaaaagtctagcttttaccggtctgatacttttttgcaatggggtggactggcaatattggcggtcattctttacggtaacttgagtcctgtaggctgggcaggaatgagtctggtgggcgatatgtttattatgatctgctggattattccttttttattttgttcccttgagcttttgtttgcccgcgatgatgacaagccttgcgttaatcgtgtaatcatcactttgtttttaccactgatttgtagtggcgtggccttctattctctctacatcaatgtcggagatgtattcttttactggtatatgccagcgggttattttaccgctgtttgcctgaccggttatctcactggcatggggtatatttttctgccaaagtttacccaaactggacagcaacgttatgcccacggtgaagctatcgttaactatcttgcgcgtaaagaggcagcaacacacagtggacgtcggcggaaaggggaaacacggaaactggattacgcgttgctaggttgggctataagcgcaaatttggggagggaatgggcgttacgcattgcccctagcctttctagcgcgattcgcgctccagagattgcccgtaacggcgttttattcagtttacagacgcacctaagttgcggggccaataccagtttgttggggcgaagttattccggtggtggtgctggcggcggcgcgggtggcggaggcggtggtggctggtaattaagctgatgttaatcgaaacaagctttaaccataaagatagtgtagtatgttgcgcctcaaagccaggccgataaacgtcgagtcgtttacttaaggcctgaagagttcaaacagactttactatcagtgagtcagatgtaagttctgactcactgttgcacaaaagcatatcagacgcctgggaaggcgacaccaaaaggaagctctatgagcgaaaagctacagaaagtgctggcgcgtgccggccacggttctcgccgtgaaatcgaatctattattgaagccggtcgtgtgagtgttgatggcaaaattgctaaactcggcgatcgtgttgaagttacccctggattgaaaatccgtatcgatggtcacctgattagcgtacgtgagtccgctgaacaaatttgtcgcgttctggcctattacaaaccggaaggtgagttgtgtacccgtaacgatccggaaggacgtccaacggtgtttgaccgtctgccaaaactgcgtggcgcacgctggattgccgtgggtcgcttggacgttaatacctgtggtctgctgctgttcaccaccgatggtgaactggcaaaccgtttaatgcacccaagccgtgaagttgaacgtgaatatgccgtgcgtgtatttggtcaggttgacgacgcgaaactgcgtgatttgagtcgtggcgtgcagttggaagatggtccggcagcttttaaaaccatcaagttcagcggcggcgaagggatcaaccagtggtacaacgtgactctgaccgaaggccgtaaccgtgaagttcgtcgtctgtgggaagcggttggtgtgcaggtgagccgcctgatccgtgttcgttacggtgatatcccactgccaaaaggtctgccacgcggtggctggacggagctggacctcgcccagactaactatctgcgcgaactggtggagctaccgccagaaaccagctctaaagtcgctgtagaaaaagaccgtcgtcgcatgaaggcgaatcagattcgtcgtgcggtgaaacgtcacagtcaggtgagcggcggtcgtcgttctggcggacgtaataataacggttaatcaaagtatgccggacgtcatatccggcatttttacagattaataatcgatccctatctgcgcttttacaccggcatcaaacgcatgtttgacggggcgtaattcacttaccgtatctgccagttcaagaatatcccgatgacaaccacgacccgtgataatcaccgtctgttgatgtggacgttcatttaacgcctgcaccacttcttccagtggcaaatagtcatacgccaccatatacgtcagttcatcaagcaaaaccatatccagactggaatcagcaagcatccgctttgcatgttgccagacttcgcggcaggcggcggtatcagactcgcggttttgtgtatcccaggtaaagcccgttgccatcacctgaaactcaacgccatgtggctccagcagattgcgttcgccattaggccaggtgcctttaataaactgcacgacgcctactttttttccgtgaccaactgcgcgtgttgccgtaccaaatgccgcggtggttttgccttttccattgccggtaaagacgatgataataccgcgttcatcctgggcctgggccacacgagcatctactttttctttcactcgctgctgacgctgttggtagcgttcatcactcattgggaaattcctggtttacggcccggttgggcgtcaaaggtcatgccggttttacggcggctgtcatcgcccatcagccagaggtagagcggcatgatatcagcgggtgttttaagtttctgtggatcttcggtcgggaaggcgctggcacgcattgcggtgcgcgtaccgcctgggttaatgcagttgacacgcaggcgctgctgatattcatcggccagtacctgcatcatcccttcggtggcaaatttgctcgctgcatatgcaccccagttggctcgtccctgacgtccaacgctactactagtaaagaccagactaccggcgtcgcttttgagtaataaaggaagcagtgcctgggtgagcataaaggtggcattaacgttgacctgcatgacgtcctgccagacctgcggattttgttcgctcattgggcaaacatcgccgagcaatccggcattatgcaaaacaccatccagacgcggataattaacggcaatgcgctgtgccagttgttggcaattttcggacgtgcaggtcagcaaatcgagaataaaccactgtggctgacgcccagtttcttcgtttatgtggctggctacctgacgtaatttttcttcattacggcccaacagaatcactgtcgcaccatagcgtgcatacgtcatcgcggcttcacgaccaataccatcgctggctcccgtcaccaggataatgcgatcattgagtaaatcttgttttggctggtaatgcatggctactcctcaacgacgttgtctgtcgcgctgccagtgtactttatgactttggggctttatgcctgaaacagaagggcatttcaatcagcctggggcgataacaccgcaaaatggatactttgtcatactttcgctgcaataacatctctgcgagacggcttaacatgcctgttgtaaactgtgagccaaagcgttgtttaaccaaggtggggactcgtggaattgttgtctgaatatggtttgtttttggcgaaaatcgttaccgttgtgctagcgattgcggcgattgccgccattattgtcaatgttgctcaacgtaataaacgccagcgtggcgagttacgggtcaacaatctcagcgaacagtataaggagatgaaagaagaactggccgcggcgctgatggacagtcatcagcaaaaacagtggcacaaagcgcagaagaaaaagcataagcaagaagcgaaagcagcaaaagcgaaagccaaactgggcgaggtggcaactgacagtaaaccccgcgtctgggtgctggattttaaaggcagcatggacgcccatgaagtgaacagcctacgtgaagagataacggctgtactcgcagcattcaaaccgcaggatcaggttgtgctccgtctggaaagccctggtggcatggtgcatggttacgggctggcggctagccaactgcagcgtctgcgcgataaaaacattcctttaactgttacggtagacaaagtcgctgccagcggcggttacatgatggcctgtgtggcggacaaaattgtttccgcaccgtttgctattgtgggttccattggcgtggtggcgcaaatgcccaactttaaccgcttcctgaaaagcaaagatattgatatcgaactgcacactgccgggcagtataagcgcacgctgacgttgctgggtgaaaataccgaagaagggcgggagaaattccgcgaagagttgaacgaaacgcatcagttgtttaaagattttgtgaagcgtatgcgtccttctctggatattgaacaggtggcaacgggtgaacactggtacggacaacaggcggtagagaaaggcctggttgatgaaatcaacaccagtgatgaagttattcttagcctgatggaaggccgtgaagtggtcaatgtacgctatatgcagcgtaaacgactcattgaccgattcaccggcagcgcggcagagagcgccgatcgattgttgctacgctggtggcagcggggtcaaaagccattgatgtaaaagacaaacgcgaggctaagacctcgcgttttgctttaatcaaccagatgatatttttcactaagcacatgggccaggtgtttgaacatattaaacaccgcggtgcttttggctgttggcaatccttgttcatctaaaaagtagtcgccggtaaataccagcacgccattacgctgcgtgacgccggtggcttcaatccctgcgagcgtatcctcatgctcacgaatgattttgttggcctctttcaacagcgtttcgcggtcgatgggttgtgtctctttgttcattatttactccttaaacaaggacattagtctacgccaggcatggcttgcagacaaatataccacgctggtggcaagagcgccttactggcaactttggattttgcatgctaataaagttgcgtatcggattttatcaggtacagtgtgacgctttcgtcaatctggcaatagatttgcttgacattcgaccaaaattccgtcgtgctatagcgcctgtaggccaagacctgttaactcagtcacctgaattttcgtgaacagagtcacgacaaggggttgatatccgcagagagcgagtccatatcggtaactcgttgccagtggaaggtttatcaacgtgcgacgcattcctggaagaatcaaattaggtaaggtgaatatgggtaaagctcttgtcatcgttgagtccccggcaaaagccaaaacgatcaacaagtatctgggtagtgactacgtggtgaaatccagcgtcggtcacatccgcgatttgccgaccagtggcagtgctgccaaaaagagtgccgactctacctccaccaagacggctaaaaagcctaaaaaggatgaacgtggcgctctcgtcaaccgtatgggggttgacccgtggcacaattgggaggcgcactatgaagtgttgcctggtaaagagaaggtcgtctctgaactgaaacaactggctgaaaaagccgaccacatctatctcgcaaccgaccttgaccgcgaaggggaagccattgcatggcacctgcgggaagtgattgggggtgatgatgcgcgctatagccgagtggtgtttaacgaaattactaaaaacgcgatccgccaggcatttaacaaaccgggtgagctgaatattgatcgtgttaatgcccagcaggcgcgtcgctttatggaccgcgtggtggggtatatggttagcccgctgctatggaaaaagatcgctcgtggcctgtctgccggtcgtgtgcagagcgtggcggttcgcctggtggtcgagcgtgagcgtgaaattaaagcgttcgtgccggaagagttctgggaagtcgatgccagcacgaccacgccatctggtgaagcgttggcgttacaggtgactcatcagaacgacaaaccgttccgtccggtcaacaaagaacaaactcaggctgcggtaagtctgctggaaaaagcgcgctacagcgtgctggaacgtgaagacaaaccgacaaccagtaaacctggcgctccttttattacctctacgctgcaacaagctgccagcacccgtcttggatttggcgtgaaaaaaaccatgatgatggcgcagcgtttgtatgaagcaggctatatcacttacatgcgtaccgactccactaacctgagtcaggacgcggtaaatatggttcgcggttatatcagcgataattttggtaagaaatatctgccggaaagtccgaatcagtacgccagcaaagaaaacagtcaggaagcgcacgaagcgattcgtccttctgacgtcaatgtgatggcggaaagcctgaaggatatggaagcagatgcgcagaaactgtaccagttaatctggcgtcagttcgttgcctgccagatgaccccagcgaaatatgactccacgacgctgaccgttggtgcgggcgatttccgcctgaaagcacgcggtcgtattttgcgttttgatggctggacaaaagtgatgcctgcgttgcgtaaaggcgatgaagatcgcatcttaccagcagttaataaaggcgatgctctgacgctcgttgaacttacaccagcccagcactttaccaagccgccagcccgtttcagtgaagcaagcctggttgaagagctggaaaaacgcggtatcggtcgtccgtctacctatgcgagcatcattagcaccattcaggatcgtggctacgtgcgagtagaaaatcgtcgtttctatgcggaaaaaatgggcgaaatcgtcaccgatcgccttgaagaaaatttccgcgagttaatgaactacgactttaccgcgcagatggaaaacagcctcgaccaggtggcaaatcacgaagcagagtggaaagctgtactggatcacttcttcagcgatttcacccagcagttagataaagctgaaaaagatccggaagagggtggtatgcgcccgaaccagatggttctgaccagcattgactgcccgacttgtggtcgcaaaatggggattcgcacagcgagcaccggggtattccttggctgttctggctatgcgctgccgccgaaagagcgttgcaaaaccaccattaacctggtgccggaaaacgaagtgctgaacgtgctggaaggcgaagatgctgaaaccaacgcgctgcgcgcaaaacgtcgttgcccgaaatgcggcacggcgatggacagctatctcatcgatccgaaacgtaagttgcatgtctgtggtaataacccaacctgcgacggttacgagatcgaagagggcgaattccgcattaaaggttatgacggcccgatcgttgagtgtgaaaaatgtggctctgaaatgcacctgaaaatggggcgtttcggtaaatacatggcctgcaccaacgaagagtgtaaaaacacacgtaagattttacgtaacggcgaagtggcaccaccgaaagaagatccggtgccattacctgagctgccgtgcgaaaaaagtgatgcttatttcgtgctgcgtgacggtgctgccggtgtgttcctggctgccaacactttcccgaaaagccgtgaaacgcgtgcgccactggtggaagagctttatcgcttccgcgaccgtctgccggaaaaactgcgttatctggccgatgcgccacagcaggatccggaaggtaataagaccatggttcgctttagccgtaaaaccaaacagcaatatgtctctagcgaaaaagacggaaaggcgactggctggagtgcattttatgttgatggcaaatgggttgaaggaaaaaataacctttaattctgtcaggtttttataaacaaagggtcgcgaaagcggcccttttttattgcatattattttttcttcacacctatacactaaggctataaatgatatagtggttatagttagcaccttttttattattaaatcgtattagtcacccgccaggtgtgacgaaaaaacgatgttctgatggcgtctaagtggatggtttaacatgaaattacaacaacttcgctatattgttgaggtggtcaatcataacctgaatgtcagtagtacagcggaaggactttacacaagtcaacccgggatcagtaaacaagtcagaatgctggaagacgagctaggcattcaaattttttcccgaagcggcaagcacctgacgcaggtaacgccagcagggcaagaaataattcgtatcgctcgcgaagtcctgagcaaagtcgatgccataaaaagcgttgccggagagcacacctggccggataaaggtagtctgtatatcgccaccacgcatacccaggcacgctacgcattaccaaacgtcatcaaaggctttattgagcgttatcctcgcgtttctttgcatatgcaccagggcagcccgacacaaattgctgatgccgtctctaaaggcaatgctgatttcgctatcgccacagaagcgctgcatctgtatgaagatttagtgatgttaccgtgctaccactggaatcgggctattgtagtcactccggatcacccgctggcaggcaaaaaagccattaccattgaagaactggcgcaatatccgttggtgacatataccttcggctttaccggacgtagtgaactggatactgcctttaatcgcgcagggttaacgccgcgtatcgttttcacggcaacggatgctgacgtcattaaaacttacgtccggttagggctgggggtaggggtcattgccagcatggcggtggatccggtcgccgatcccgaccttgtgcgtgttgatgctcacgatatcttcagccacagtacaaccaaaattggttttcgccgtagtactttcttgcgcagttatatgtatgatttcattcagcgttttgcaccgcatttaacgcgtgatgtcgttgatgcggctgtcgcattgcgctctaatgaagaaattgaggtcatgtttaaagatataaaactgccggaaaaataatttcttgcgttattttcggcaccttttatgtagcgaaggtgccggaatatattctcttttgttacttatttctataccgtgcacaatatttttatccctcatatttatagggtaaattacctgtaaagtagtgtctaattacccgcctcgcaaactccagttttcaaatatctatttcaggtcaaaagattgaattattcactggagacgattcgtaaattcgctggatttttgactaaagtttctttaggatttgtctcatcgtatgattaattacaccaatcgttcaacgtcttgctgataagtgatggcgattatatgaggttagcaatgccttctggaaatcaggaaccccgccgcgatcctgaattaaaacgtaaagcctggctggcggtttttcttggttctgcacttttctgggtggttgtcgcactgctgatttggaaagtgtggggataactatggtcggtcaggagcaactggagtcgtcaccattatgccagcatagtgacaatgaaacagaaacgaaacgggaatgttccgtcgttattccagacgactggcaactaacatcgcagcagcaagcctttatagaactgtttgctgaagatgatcagccgaaacaataattatcatcattcttattacccatttttaatgaattaaagggcttttaatacaccgcagcaataacagcttgagttatctcaacacaaaataataaccgttaagggtgtagcctatgatcaacacaaatatgaaatattggtcctggatgggcgcgttttctctgtcgatgctcttctgggccgaactcctctggatcattactcactgatccttgaccccgctgcggcggggttgtcatttgctttgccacaaggtttctcctcttttatcaatttgggttgttatcaaatcgttacgcgatgtttgtgttatctttaatattcaccctgaagagaatcagggcttcgcaaccctgtcattaaggaggagctatgagcagtaccctacgagaagccagtaaggacacgttgcaggccaaagataaaacttaccactactacagcctgccgcttgctgctaaaagtctgggcgatatcacccgtctacccaagagtctcaaagttttgctcgaaaacctgctgcgctggcaggatggtaacagcgttaccgaagaggatatccacgcgctggcaggatggctgaaaaatgcccatgctgaccgtgaaattgcctaccgcccggcaagggtgctgatgcaggactttaccggcgtacctgccgttgttgatctggcggcaatgcgcgaagcggttaaacgcctcggcggcgatactgcaaaggttaacccgctcagtccggtcgacctggtcattgaccacagcgtgaccgtcgatcgttttggtgatgatgaggcatttgaagaaaacgtacgcctggaaatggagcgcaaccacgaacgttatgtgttcctgaaatggggaaagcaagcgttcagtcggtttagcgtcgtgccgccaggcacaggcatttgccatcaggttaacctcgaatatctcggcaaagcagtgtggagtgaattgcaggacggtgaatggattgcttatccggatacactcgttggtactgacagccacaccaccatgatcaacggccttggcgtgctggggtggggcgttggtgggatcgaagcagaagccgcaatgttaggccagccggtttccatgcttatcccggatgtagtgggcttcaaacttaccggaaaattacgtgaaggtattaccgccacagacctggttctcactgttacccaaatgctgcgcaaacatggcgtggtggggaaattcgtcgaattttatggtgatggtctggatagtctaccgttggcggatcgcgccaccattgccaatatgagcccagaatatggtgccacctgtggcttcttcccaatcgatgctgtaaccctcgattacatgcgtttaagcgggcgcagcgaagatcaggtcgagttggtcgaaaaatatgccaaagcgcagggcatgtggcgtaacccgggcgatgaaccaatttttaccagtacgttagaactggatatgaatgacgttgaagcgagcctggcagggcctaaacgcccacaggatcgcgttgcactgcccgatgtaccaaaagcatttgccgccagtaacgaactggaagtgaatgccacgcataaagatcgccagccggtcgattatgttatgaacggacatcagtatcagttacctgatggcgctgtggtcattgctgcgataaccagctgcaccaacacctctaacccaagtgtgctgatggccgcaggcttgctggcgaaaaaagccgtaactctgggcctcaagcggcaaccatgggtcaaagcgagcctggcaccgggtagcaaagtcgtttctgattatctggcaaaagcgaaactgacaccgtatctcgacgaactggggtttaaccttgtgggatacggttgtaccacctgtattggtaactctgggccgctgcccgatcctatcgaaacggcaatcaaaaaaagcgatttaaccgtcggtgcggtgctgtccggcaaccgtaactttgaaggccgtatccatccgctggttaaaactaactggctggccagcccgccgctggtggttgcctatgcgctggcgggaaatatgaatatcaacctggcttctgagcctatcggccatgatcgcaaaggcgatccggtttatctgaaagatatctggccaagcgcacaagaaattgcccgtgcggtagaacaagtctccacagaaatgttccgcaaagagtacgcagaagtttttgaaggcacagcagagtggaagggaattaacgtcacacgatccgatacctacggttggcaggaggacagtacctatattcgcttaagccctttctttgatgaaatgcaggcaacaccagcaccagtggaagatattcacggtgcgcggatcctcgcaatgctgggggatagtgtcaccactgaccatatctctccggcgggcagtattaagcccgacagcccagcgggtcgatatctacaaggtcggggtgttgagcgaaaagactttaactcctacggtagccggcgtggtaaccatgaagtgatgatgcgcggcaccttcgccaatattcgcatccgtaatgaaatggtgcctggcgttgaagggggggtgacgcggcatttacctgacagcgacgtagtctctatttatgatgctgcgatgcgctataagcaggagcaaacgccgctggcggtgattgccgggaaagagtatggaagtggctccagtcgtgactgggcggcaaaaggtccgcgtctgcttggtattcgtgtggtgattgccgaaagctttgaacgaattcaccgtagcaatttaattggcatgggcatcctgccgctggaatttccgcaaggcgtaacgcgtaaaacgttagggctaaccggggaagagaagattgatattggcgatctgcaaaacctacaacccggcgcgacggttccggtgacgcttacgcgcgcggatggtagccaggaagtcgtaccctgccgttgtcgtatcgacaccgcgacggagttgacctactaccagaacgacggcattttgcattatgtcattcgtaatatgttgaagtaacaactatttgcttgccggttattttgcttccggcaagcaaatgaattacacaatgcaagagggttatttgttcagcaaatggcccattttctcggctttggtatcgagataatgttcgttattggggttacgacctacaatcaatggtacgcgttcaacaatattaatccctgcttcggtcagaatttcgacttttttcgggttattggttaacaagcggacttcattgacgccaaggagtttgaacatatcagcgcaaagagtgaagtcgcgctcatcagcggcgaagcctaactggtggttagcctctacggtatcgtaaccttgatcctgcagtgcgtaagcgcggattttattcagcagaccaatgttacgaccttcctgacggtgatacagcaaaataccacggccttcctcggcaatttgcgtcaatgccgcttcgagctggaagccacaatcgcagcgcaagctgaacagggcgtcaccggtcagacattcggaatggacgcgcgcaagtaccggggtatgcccggaaatatcgccatagactagcgcgacatgatcgtgtccggttgccagttcttcaaatcccaccatcaggaaatcgccccatggggttggcagtttggcttctgccacacgtttaagctgcatgaaattctccagataatgctggttctgtattggcttattttgccataacgagaaggggttcacctaatcacgacgcgtcgatcgttcacggaatggcacaaatctgtcaatttttcctggaactggcgttttcagttatgattgtgggacttatcaaaaaggagaggccatgcgtagcattgccagacgtaccgcagtgggagctgcactattgcttgtcatgccagtagccgtatggatttctggctggcgttggcaacctggagaacaaagttggctactaaaagcggctttttgggttactgaaactgtcacccagccctggggcgtcattacacatttgattttattcggctggtttctctggtgtctgcgttttcgcattaaggctgcctttgtattatttgccattctggcggccgcaatccttgtgggacaaggcgttaaatcctggatcaaagacaaagtccaggaaccacgaccttttgttatctggctggaaaaaacacatcatattccggttgatgagttctacactttaaagcgagcagaacgcggaaatctagtgaaagaacagttggctgaagagaaaaatatcccacaatatttgcgtagtcactggcagaaagagacggggtttgcctttccttccggtcacacgatgtttgctgccagttgggcactgctggccgttggtttgctgtggccgcgtcggcgaacgttaaccattgctatcttgctggtctgggcaacgggagtcatgggaagccgcctgctgctcgggatgcattggccacgcgatctggtagtagctacgttgattagctgggcgctggtggcggtggcaacgtggcttgcgcaacgaatttgtgggccattaacaccacctgcggaagaaaatcgcgaaatagcgcaacgagaacaagaaagttaacgctggttgattttccgaatttagcccttaaatcatcaacaatgcgtgtggatgccatttcgcagacggcgcgaaaatggtactttaaagggctattgcggtaagttgaccataatttattcgctctaaccacataacgggaagtaatgtgaaatatttactcattttcttactggtgttagcgatcttcgtgattagcgtcacgttgggtgcgcagaacgatcaacaggtgacgtttaattatctgttagcgcaaggggagtaccgtatttccacattgctggcggtattgtttgctgcggggtttgctatcggttggttgatttgtggcctgttctggctgcgagttcgtgtttccctggcgcgcgctgaacgtaaaataaagcgactggaaaaccagcttagtcccgcgactgacgtggctgtagtgccgcacagcagtgcggcgaaggaataactttctatgctggagttgttgtttctgcttttgcctgtagccgctgcctatggctggtatatgggccgcagaagtgcgcaacaaaacaagcaagatgaagccaaccgcttgagccgtgattacgtagcgggggttaacttcctgcttagtaatcaacaggataaagcggtagacctgtttctcgatatgcttaaagaggatacaggcaccgttgaagcccaccttacgctcggaaacctgttccgtagccgtggcgaagttgatcgcgctattcgcatccatcagaccctaatggaaagcgccagcctgacctatgaacagcgtctgttggcgattcaacaactggggcgtgattacatggccgccgggttatatgaccgcgcggaagacatgttcaatcagctgaccgatgaaactgacttccgcattggcgcgctgcaacagttgctacaaatctaccaggctaccagtgagtggcagaaagcaattgatgttgccgaacgcctggtgaagctgggtaaagataaacagcgcgtcgaaattgcccatttctactgtgagttagccctgcagcatatggccagcgacgatctcgatcgtgccatgaccttgctaaaaaaaggggcggcggcagataaaaacagcgcccgcgtatccataatgatgggacgcgtgtttatggcgaaaggagaatacgccaaagccgtcgaaagtctgcaacgcgtgatatcccaggacagagaactggtcagcgaaacgctggaaatgttgcaaacctgctatcagcagttgggtaaaactgccgaatgggcagaattcctgcagcgtgcggtggaagagaacaccggtgccgatgctgaattgatgcttgctgatatcatcgaagcgcgcgacggtagtgaggccgcacaggtctatattacgcgccagcttcagcgtcatccgaccatgcgtgtgttccataagttaatggattaccacttaaatgaagcggaagaagggcgtgccaaagagagcctgatggtgctgcgtgacatggttggcgagaaggtacgtagtaagcctcgttatcgttgccagaaatgtggttttaccgcatacaccctctactggcattgtccgtcttgtcgggcctggagtaccattaaaccgattcgcggtcttgatggcctgtaatttttaaaaaaaatccgactttagttacaacatactaattattaatgttccattgtgctccggcaacgacggcgcagaaaaagcctgccaggggagaaatcgcaactgttaattttttatttccacgggtagaatgctcgccgtttacctgtttcgcgccacttccggtgcccatcatcaagaaggtctggtcatgacgttaactgctagttcttcttcccgcgctgttacgaattctcctgtggttgttgcccttgattatcataatcgtgatgacgcgctggcctttgtcgacaagatcgacccacgcgattgtcgtctgaaggtcggcaaagagatgtttacattgtttgggccacagtttgtgcgcgaacttcaacagcgtggttttgatatctttcttgacctgaaattccacgatatccccaacactgcagcgcacgctgtcgctgctgcagctgacttaggcgtgtggatggtgaatgttcatgcctctggtggggcgcgtatgatgaccgcagcgcgtgaggcactggttccgtttggcaaagatgcaccgcttttgattgctgtgacagtgttgaccagcatggaagccagcgacctggtcgatcttggcatgacactgagtcctgcagattatgcagaacgtctggcggcactgacgcaaaaatgtggccttgatggtgtggtgtgttctgctcaggaagctgtgcgctttaaacaggtattcggtcaggagttcaaactggttacgccgggcattcgtccgcaggggagtgaagctggtgaccagcgccgcattatgacgccagaacaggcgttgagcgctggtgttgattatatggtgattggtcgcccggtaacgcaaagcgtagatccagcgcagacgctgaaagcgatcaacgcctctttacagcggagtgcatgatgagtgattccaacagccgtctggtctacagtacggaaaccggacgtattgatgagtccaaagcggcccctgtacgccctaaaggcgacggtgtggtgcgtattcagcgtcagaccagtggacgtaaaggtaagggcgtttgcctgattaccggtgtcgatctcgatgatgccgaactgacaaaacttgcagcggaactgaagaaaaaatgcggctgcggcggagcagttaaagatggagttattgaaatccagggcgataagcgtgatttattaaaaagtctacttgaagcgaaagggatgaaggtaaaactcgcaggcggttaacataaaaagccacggatatatccgtggctttcgaatattttactgtgcgtattattcagttatttcgtactgaacagaatcaagcgtattataattgcgagtcgataatcgacatttatttacgattatttaccgacctggtgaccaataacacctccgacagctgcaccacctaatgtacccaacgtactgccatcggtcagtactgcaccgcctaatgcccctgcacccgcgccgattgcggtgttgcggtcccgtttagaccagttagaacaggcactcagagacattgccaaagtaattgccagaacagccgcggtcatttttttgctcgttacaaacataatactctctcctgaatttatgattcacggaagtaagctctctataactataatagctaagaataagtctggtgaaattattccgtgaaatctgctcgcgcgcagggttatatcacgcaggtgataatgacttcctgttatatcgctgataataattttatatcttgagagtgttaataacaggtaaatagtcttaattatcaaccaggaatcatcttagagcggatgatttgccaaactgcaaatcatccgtagagaagggaaatggttaaatgtcaacgacgtgaatggtgagtttactgtgctcaagatgcatcagatcgctggcgcgtattttgctatcggtaatcacgcgattgaatcgctcaacgggaccgatggagtaactatgtacagcaccaaatttgctgctgtcagtcaggactatcgcttcgcactctttttccagcacggcattgaccacatcggtacgcatcatatcgcgaccggtaaatccagtttcaggttgccagccatcaataccaataaatgctttgctgaaatgcacctgttggatgcactggcgtgtcaaagggccaaccatactttcgctttttttctgatacacgccaccgagcaaaataacttcacaaggcgcgtctttcagcaaatgcgcgatgtagctgctgaccgtgatgatagtgacatttttcttctgctcgcccagagtccgggcgagtagggcattgctgctgccattttcgataaagatggtttcgcccggttgaaccaggctcgcggcaaactcggcgagttcacgcttcagcgtatagttgctcatcatacgggtttcgacgtcatcactatcaaggctaacagcaaagccatgtgcacggcggaggtaactcagtttttcgagtgtgttgagatcctggcgaatggtaacttcagaaactccagtggcttttgccagatcggttacgctaacctgaccctggtcaatgaccatctgtagaatagtttgttgtcgggaattcatcgctgtaattcttataacgttataatacttaataaaaaaatactgacgcgccgggcatcctcaaataggaaaacctgaaggcacgattgttaaatctcccacggtgccttcgggatgtctggcgtagattcagcaacctggcgcaagagttctgctttaagtatctcgagattatggatcgcagagtggtaatcgcctgccacaaggatatctaacacaatatcaatacgttcggcaacgcgctgggcatcaaattcagacatcaaggacatccttatagcaaaagggggaaaatgaataatgcaaaaattgccgctaaaagagaagtgtttaacagcaacggctaattatcatccaggaatacgatatataatgacgggatatagcgctaagtatatatattcatctacttatgcgcgcttcagatagcgtttataccagcgttcgaaggcgacggcgggcatcggtttggcaaacaaaaatccttgccgctcattgatcccgttcttggttaaaaaagcatcttcctttgcactctctacaccttcggcgatcacctgaagattcaatgcctgggccacagcgacgatcgcccggaccagactctggctgacaggttgtttgtgaatatctcgaacaaaaacctggtcaagtttgatggcatcgatcggaaagcgcgccagttggctaagactagagtagccggtaccaaaatcatccagatgcacttgcgcacctagttggctaaattgttgaataacagacagtgccagttcatcattctcaatcagacaactctctgtcagttcaacatctatagggcagtattcaaaattgagttcctggagaacctgtttcagggcggtgaaaatggtttgatcggcgagctgacgtgcagaaatatttaccgccactcgcaggtttatgcctttatcccgccactttgccacctggcgtacgacatcgagaatcacccaacggcctaaaggcacaattagcccactctcttcggcgtaggaaatgaagtccaacggtggaatcaacccacgttcaggactctgccaacgtactagtgcttccagactgcgcacttcgccacgccaggtgattttcggttgatagtgaataaccaactgatcgttttccagtgctttacgcaagttggtatccagccagagatattcaaatacccgttgattcatttctggggtaaaaacgcaaaattgtcctcgtccgccttccttcgctgtgtacattgctgtgtcggcgtgacgaataatagccgtgctgtcactaccatgttcgggagagagtgcaatacctacactacagctggtataaacttcaattaaaccaatgcgaaaggggagccgtaagcgggtcaaaattcgacttgccattgcttccagcgcgctttgactggtgttggatgccagtaccagaaactcatccccacctggacgagccaacacctggtcatgttcgagacagcttaaaatagccaaactcacgtcgcgtaataactggtcaccaaacaaatgcccataggcgtcgttgacctttttgaaattatccaaatcaagatacacaaccccaactttattgttatctgcatgattaatagcgtgatcgattaaatcctgcattgcgttacgattcggcagtccggtgatactgtcggtatttgccagaatacgcagtcgctcctgagcgcggcgctcttcggtaatgtcggtgccggaacagattaaaaaaatctcgtttttgccactgccgctgtggacaaatttattgcgaaacagaaacagccgctggcctttacatgttggtatccacagttcgacttcatatgcattgccgcttcgaaaaaatacacggttattgcgcctggatgccgcagcttcacgacggctcataaacagtttaaacacgctttgcccaatgacgtcgtgttctttcaaccctgtgtaatcttcacataaccgattgaagcgttggatattcccccggctgtcgagaatcactattgcggaatatgcttcagaaactacctgctcagcaaaggaaagcccgtgacttaaatcacgagcaaccgccggtgtgtcatgccatgcagacgcgttgccagcccattcccgtttattgatttttcgtcctaccagatgcacagaaagatcgctttcatcgacggtcagactcatcatcaggctggaggtgatggccgtcatttccctgatgcgagcagcctgttcggcagataactgcaatgtacgatcaggttctgtggtttcggtggtagaaaagcgcaaaacatcgctgctttccgtcaaccgccagtatggattgtggcttccgagaaagttgtacaacgttgtggactccctaacggttttcatgatgcatatcctccggttaacagcggagtccgcggttaaataaaaggaacaacatgacttacatgaaattaacggcggctaaacgcattgttttttttatatatttatttgtaatccagttttggaaaaacgccagttttcaaacgaaagtcagttaaaaaatctgcctggatataacgaaggtagagcggggaaataaacggcccatccatgaggaatgggccgtgaaaggagattacgcgaccgggcgcgcaataatgctgcgggtttccatgcggacttcggcaatagtgacgtcaataacgtcagtcactttgtaaaccgtttcacctttaatttgtacagtgccgttttcctggctgcaaaccagttcatcgcgcacagcgtgtaagaaaggtgccggaataaaggcgatagcgccgttatcaaccaaacgaacacgcatgccgccacggctgatatcgacaatttccgctgcgaaacgggtgtcggtcccggctttgtctttcaggaagcgtgcgtataaccagtcaccaacatcacgttctgccatccggttgagacggcgacgctcggccatttggacagtgatttcatcctgtgggcgcgtcgcagtttcgcctttgataaccgctttcagcagacggtggttgatcatgtcgccatatttacggatcgggctagtccaggtggcgtatgcttccagaccgaggccaaagtgaggaccgggttcagtgctaatttcagcaaaactctggaagcgacgaatgcggctgtcgaggaaaccagttggttgcgcgtccagttcacgacgcagtttgcagaaaccgtccagcgtgagcacttcttcggcatcgacatgcagaccgtgcgttttcagcaacgctgccagcgcgtcggcattcgccggatcaaagcccatatgcacgttatagatgccaaaaccgagcttatcgcgcagtacgcgggccgcacaaatgttagcggcaatcatcgcttcttcgacgatacggttggcaatgcgacgaggctcggcgacgatatccagcacttcacctttttcaccgagaataaagcggtaatccgggcgatctttaaacaccagtgcgtggttatgacgccactcgccgcggcgttggcaaatttgcgctagcaaacggacttgttcggcaattgcttcactttcaggctgccagtcaccggtattttccagccagtcagaaacctggtcatacaccagctttgctttggattcgatggtggcggcaaagaattcgatattatcttcaatggtgccatcagcggagagcgtcatgcggcatgccagtaccgggcggacttcattggcgcgcagactgcagagatcgtcagaaagctcgcgaggcagcatagggatgttgaagccaggcagatagttggtgaatgcgcgaattttcgcggctttgtccagcttgctgccttcagcaatccacgcggttggatcggcaatcgccacaatcagctgaagtttgtcatccggcaacgccttagcgaaaagggcgtcatccatatcttctgtgctggcactgtcgatggtgacaaaatccagcgcggtcagatcttcacgaaccagaccttcatcgagcatttcggtagcgacgccgtctggtgcttctttttccagattatggcgtgcaagggtaacccaccacggtacaaagtgatcgtcaccaaaagtgatgtattgtgtcagttctgcatagaaagaacgatcgcctttcagcggatgacggcgcatttcggcaaccgcccagtcgccttctttaaactcgtggttcaggccacgggctgcgcggcaaggaatggcgtcttttaagagtggatgatcaggaacgatggccagacggtcatttttgccctgaaccttacccacgaaacgagtcaggaacggttcaaccagttcttctggctctgcggattcacgttctttttcactgtggatcaccgcgataattcggtcgccatgcatgacttttttcatctgcggcggcggaatgaaataacttttttgcgcgtcgacttccaggaagccaaagcctttttctgtggcttttaccaccccttcagcgcgtggcgtctgggaatgcagttgctgtttaagctgcgctagcagcgggttgtcctgaaacataattgtctattttggtggccattagagcggctgacagttttacgcgaatctgtctgacgcggcaaggttaatatgtctcacccaacgcgatttttaagcgatttatccagccacacagcccgctccataccagcagattaataatctgcgtactacttttttcgtgttcgagtaaagggctgaactgggcggcgctaaagcgatcgggtgctcgggtcagccattgtatcgcctgaacggtagcgcgctcaacagaatgacggtcagcccattggttaatttcattttcgcccttgcgcataagggtgctgatttttttatattcattactactatccatacaggtggcaaaacaagcaggactgccatttatacgcgcgcataacaacgccgcaagctgattatccggctgtgtattgccccgtgtgctgtttaacaacttttcgagaagggaaagactaatagggtggagagagagtatttcggccagttggcaaagttctgcagtactactttttgtgtgctcttcaggtagtttttccacctcatagctgcttcgccagcgtaaactttcatcagcaaacagactcgcgtcggcgtagttttgtatctccagcccgggtaaccagcgtaccggatgcccgagataagcctgaaatgtcgcaattgtccgcgcctgaaagccaataaaaccaatgatttggctaatgatcacacagtcccaggcagtaagaccgacgtcattcagatgctggcggcttcggttgtcgataatagaagggctgctagccagttggcgggcatattgcgtgatttgtgccaaccgatgattactttccctggtggaatcaggcccggggagcggcgtaagtcgcgcgctatagtagttacataaccgctggacgccgcaaacctgagcaaccgtcagggccgtgctcaagcgttcataagcggtgaaggtctgactacgggtcacggtaagctggtcagggaacaaatccactgcaagaacacgcgcagggtccagccaactaaggaagggggccagcgtttctttttcaaggatcacgtcgagtagaaagggatcgctgacctttgcggcttccgggaccagaggcagaacgtcatactccgtagtactggattgcgtttcatgataccagtggcttttgccggtgatgtggcgttgttccatgggcgctccttggtcgtaaaggaaatcgttatcctgacgcaaggcgggaaggggagaaagacggatcggcgataacaaatatcagaaaggtataacagagataacgggcggcagaacgccgcccatctttaccaacagaacgattatttcagttcgagttcgttcattgcagcaatgctgaaaccgccgtcaacgtggaccacttcaccggagataccggcagagagatcggagcacaggaatgccgcagagttacccacatcttcaatagtaacggtacggcgaatcggggtaacggcttcgcaatgagccagcattttgcggaagtctttgataccggaggccgccagagtacggatcggaccagcagagatggcgttaacacgcacaccttccggacccatcgcgttcgccatatagcgcacgttcgcttccagagacgcttttgccagacccataacgttgtagttcgggatagcgcgctcagcgccaaggtaggaaagggtcagcagggcagaacccggattcagcatggagcggcaagcttttgccattgcaacgaagctgtaggagctgatgtcgtgggcaattttgaagccttcacgggtaacggcgttaacatagtcaccatccagctgatcgccaggtgcaaaaccaatagagtgtacgaaaccgtcaaatttcggccaaactttccccagttcagcgaacatggtgtcgatgctggcatcttctgcaacatcgcactgcagaacgatgtcagaacccaattgagcggcaaattcttctacgcggcctttcagtttgtcgttctggtaggtgaatgccagttcagctccttcgcggtgcatcgcctgagcgataccgtaggcgatggatagtttgctggcaacaccggttaccagaatgcgcttaccggaaagaaaacccatagctttaatccttattgttgatgcttgttgtgcctgaaaatcaggcgattcgtcgttttagtaaacagtacgaacagataaacggttattataatcaacctggctgtgagtagctatagttgccaggtccgaccggagcaggctgcggcagggggggcgcttttcccctcaccctaaccctctccccagaggggcgaggggaccgtattgtgcaaatattgttaccccagcaacaaacaggctcatacagcccctaaccctttcatggcgatggctgggacggttcagaccttgccgaatattctccagcaccgtctccatgttttcaccacaacagctattcggctcggtctgccccctcgctctttcagggagagggactccggcggttcagttcctgcagaatattctccagcaccgtctcctcattacaatcaatctcgttattccagaaacgcagcacggtccagccctggctctcaagccagctagtgcgcctggaatcataggcaactgctaaatcatgctgcccaccatccagctcaacgactacacgcgcgctgcagcaagcaaaatcgagaatgtagctccccactggatgttgacggcgaaatttgaaatcactaaaacgtcggctgcgaagatatcgccagagctttcgttcctgcaaagtgagattgcgtcttaaatcacgcgcattacttttaattttatctatcacctcattctgacaagatttaatcttttgtcagaatgaggtgaataatctggaaggaggattcagaaaattagcgatctttacgccacgcatccgccgtcaatgcctcgccaaaatgaccggcaatcagccgtttggtgagttcatgcagcgggcttgccagcacatccgcggtgctgcctcgctcgacaacctcgccctgatgcatcaccagcacctggtcgctaatgtgcttcatcattccgatatgctgggtaacataaatatagctaatgccctgtttttcctgtaattccagcatcagattaatcaactggctacgcatgctcatatccagactagcgagggcttcatcggcaataatgacttttgggcgcaatatcagcgcgcgcgccagacccagacgctgtttttgtccgggtgccaacatatgcggatagtaactgacgtgatccggtagcagcccaaccatacgcatcgtttcaataatctgtttgcgacgctgttccggttccaggtcggtgttcaggcgcagtggaaaatccagaatttggctgatacgttgacggggattcaagctggtgctaggatcctgaaaaatcatgcgaatacgctgactgcggaaggaataatcgccaaaatgcagtggatgatcgtcaatcaataactcgccgctggtaggctctatcattcccgccagcatttttgccagcgtggatttaccgctaccattctcgccaataatcgccagtgtctggccttcacgtagcgtaaagctcaagggttttaccgcttctacggtctgacgacgaaaccagccggtccggtagcggaacgttttacttaaattacgcacttcaagcagcgtttcgatcatctcactctttctccatgttcagcgggaaatgacaggcatagagatgatttttcgcccccgtcaaacgtggcgtcacaatgcattctcgttgtgcatacgggcaacgtggccccagacgacaaccaatcggtaactgttccagcagtgggatagcgccgggcagcgtattgaggcgacttttatgcggcatcgcgctgccgaagtctggtatcgcgcggatcagcgcctgggtataaggatgatgtggcatcgtcaccaactccttactcggcgcggtttccactgtttgaccgcagtaaagcacgttaattttatccgcccattggctaagcatttgtaagtcatggctgataagcaaaatagtggtattgctgttttggttgagacgcgtcagcaggcgaaagatttgcgcctgggttgttggctccatactgttggtcggttcgtcagcaatcagcagacgcggttgattcgccagtgcaatggctatcatcactttctgacattcaccttcggtcaactcatagggaaaactgcgcatcgcatctttgtgatctttaatccccacgcggtgcagcagttcaatggcacggcgtttgcgccagccaaaacgctgccaccaacggcctttataggtccaggctgggatgttttgcatcaactggcggcccacacgttcactagggtcaagacagctctgcggttcctggaaaatcatgctcacgttatggccaaccagtttgcgccgttcgcgtgcggagagacgcagcaaatcgatatcatcaaaacgcatacggtcagcagtaacacgccagttatctttattcaccccacaaatcgctttcgcaatcaaactcttgccggaaccggattcaccaacaagaccgcggatttcaccttcggttaaggtcatacttacccggtcgacggctttaacccactcatcaccggttttaaattcaatggtcaggttacgaatatcgagtaatggcattattccacccccgcaataatcgcacgacgaacgccatcgccaaggaggttaaccaacaacacgctaatcataattgccgcacctggcagcatgacagtccacggggcgacataaatcagttccagcgcatcaccgagcatcgctccccattcagggctggggagttgtgcgccgagatcgagaaagcccagcgcggcgatatcgagaattgccatgctcagtgcgcgggtgatctcggtgaccagcccggcggtgatgtttggcatcacagcaaaccagagaatattcagcgtacttgcgccatccagacgggcggcgataacgtactctttttccagttcgtcatgcaccatgctgtaaatgctacgtaccatacgcggcagcaatgccagccagacagcaaacatagcgtgggacaaactcggtccggcaaacgctacaacgataattgccaacagcaggctagggatcgccagtaaggtatccagaatatggttaagcaccgcactgcggaggccgtgtgtcgccccggcgaaggtgcccagtaccaggccacagatcgtcgcggcaagcgtcaccacaaatgcgccacccacggttggcgcagctccgctcagtaaacggcttaaaacatcgcgtccgaggtcgtcagtccccaggaagaaagaaacttcgccatagcggctccaactcggcggcaataattgataaccgagaaattgctggtcgatgccgtaaggcgcaaaccagccgccaaaaatacacagtacagccagccccgcgcagccgtacaggccgaccatcgcagaggcgtcactataaaatttgcgccaggcggtacgcagcgtgcccggcgggcgcttttcgctgtatacgctatcgtaaggcataccattccttatgtttcagattatttatcgtaaggcataccattccttatgtttcagagggttagccatggcacccaaaatatcagaaatcacgttaacaataatgaccagactgccacacaccatcactccggcggaaatggctgcgtaatcctgctggcggatggcgttaattaaccagcgccctaaacccggccagctaaaaaccatttcggtgatcatcgccagcgtcagcatggtggaaaactgtaagcccaggcgaggaataaccggcggtaacgcgttatgcagaacgtggcgacgcaaaatagtaaagcggctcaaaccgcgggtcgccgccgcttttacatagttctggtcatacacttcgatagtgctgatacgcatcaggcggatcacttcagttgttggcgcaacgctcagggtgatcacgggcaatatcatatggcggattgcgctcatgatcatttcatcccgccatggactgtcgctaagccaggcatcaatcaacgcaaaaccggtaatcggtttcacttcgtagagcagatcgaaacgcccactaacgggcaaccaacctagcgtgagactacaaaacagcgtcaacagaagcgccagccagaacaccgggatactaaagcccagtaaggcgatggcgttgatcaagttatcctgccacttatggcgcgtaatcccggcaatcatccccacggggatgccaacaatcagcgcaaaaccgaaggcgaggatgcacagttccatcgtcgccgggaagacctcttttaactgttcggcaatcggttgaccgttaatgctggaaacaccaaaatcccagtggatcaggccgttaaaccagaacacccaggcattccacagactcgcgccttgtaacggcgcatgaggggtgaaatagctcaagctgaagccaacgaaggtcagcaggaacaaggtgacaatcaataacaaaatgcggcgtaaggtgaagataatcatggttttttcacctcatcctgtttctcgcgatacaccccagcaaaggaggcgttaccaaacgggctaagtaccagacctttgatatcgtaccgataggcctgcaaacgcaaactgctcgccagcggcaaaatgggcaattcctgcgccagaatactctgcgcttcgtcataggcttcaatacgcgccgccagctgctggctagagagcgccttacgcaatacgctgtcgaatttcggatcgcaccagtgggcgaggttggtctggctatgaattgccgcgcagctcagtaacggacggaagaaactgtccgggtcgttactgtccgtcgcccaaccggataacgtcagatcatggctcatatccatcaaccgcgcctcctgaaagcgaccttctaccggcacaatcaccacttttacgccaacctgcgccatatccgcctgaatcagttcggcagttttcagtggactggggttccacgcctggctacgtgtgggcacccacagtttcagcgttaaattttccagccccaagctcttcaactgttcgcggcttttcgccggattgtattcagtaattttagcctcgttgtcataggcccagctggcgcgcggtaaaatagaggccgccgtttcagccgtaccataatagatggattgcatcaggcgctggttattaatcgccagtgccagcgcatggcggacagcgggattatttagcggcggtttggcggtgttaaatgccagataggcgacgttcatcccaggacgcagcgttaaacgcaagcgcgggtcgtcacgcaaaatggatagctggctggcagcaggccaggccagaacgtcgcattccccggtcaggagtttgctcagacgtccggtgccgccggagcctaaatccaccactacctgcggcattaacggtttaccgcgccagaagtcatcatgacgttgtaggcgaataaattgcccggcgcggtattcgctcaactgatacggaccggtgccgaccggttgacggtcgagttgctcctggcgatcttctttctctaacttccgggcatattctgcgctcatgacgctagcataatgggttgcgaggtgccacaaaaaagaagcatccggctgggcgagtcggaactcaacggtatgattatccagtttgcggacgcttttcacgttatcggcaaattgcaggctgtcgaagtaggggaagttgctgccgttgacgttatgccacgggttgttgcggtcaaaaattcgctggaaggtaaacaccacatcgtcggcattcattttacgagtgggagtaaaccagtcggttttttgaaacggaacatcgcgacgcaggtggaagcgataggtcgcgccgttgtcgagtacttcccagctttcggcaagttccggcatcaggcgataggtatagggatcgacatccagcagtcgatcataaaactgggcggcaagggtatcgacaattaacccactgctcgctttggatgggttaaaggtgttgacttgcccgctgacgcaatagacaaaaccgctgtcgcggatatcagcatgcgggggagattcaggcgcggcgattgcctgaccactcacaagtccagcaatcaccaaaagagagcttaatacctggcgcataatattaagggattttatgtaaagaggctatcttactaatatttaatgacatttgccattaccgtttgtgttcaggggtcgtaatgagggccgtgtggttggtcgttgaacaggtgacgtcgccatctgttcaacattcgtacccgtgatttctctataactataactcacagaacaacttagcgaggagcagagcggtacgatcgtgagaaacccattaaagcacgctgcagtgcgtgtcattgttagccagatgcggcgtgaacgctttatccggacaacgatactgaccgatcgtctgcaattaaatcattactcattaccccattgattcaaaaactctgcgatctcatcaatgcgtacgggattaatccccgcttcagcagccatttcatgttgggcttcttcgctgatctcttcattgttcatcaaacgggtgagcagtaactggaagtagtgggccagcggtgtgcgttcagcctctgcgacaggctctgcgcattcggtcgcgtactcatcggcaatatcaaaatattttagcgggatatcgtggttcattatttgcccctggggttaatgcgctaagcataagggcggatgatagcactcgtgatccgggtcatacatctttttatagttaatggcgcggcgcgttaccctcaggcaggataatgcgccgcgcatccgactattacgtttcactcaccggcgttctgtcaccatcatacaacggcactttgcgatagcggcggatcagataccataaatatgcgccgcctaagctagcccataccagaccgagtgtcagactcgtactctcgaggttaacccacagcacacccaccgtcagcgcgccaaccagcggcatcagcaaatagtggaagtgatccttccagcttttattcattcctttacgccgccagaaatgattaaacacgctcagattcacgaaggtaaacgccaccagagcaccgaagttaattaacgctgtggcggtaactaaatcgaagaacagcgcgctcaacgcgacaatcccgaccataatgacgttgagtgccggagtccgccattttgggtgcacatagccaaacacgcgctccggaaacacattgtcacgccccatcacatacagcagacggctcacgctggcatgactagccaggccagaggctaacgtgttcacaaacgtggtgcagaggaaaatgctctggaagagcttgccgccgacgtacagcgcaatttcaggcagtgcggcatccggatctttaaagcggctgatatcgggaaagaacagctgcataaagaagctcgccgcgataaagataacgccaccgtagaccgccgtcaggaagatggctttcgggatcacgcgtgcggcgtccggcgtctcttcgctaagcgtggtcaccgcatcgaaaccgaggaaggagaaacagacaatcgtcgccccggtaataatcgggatcaggtgcgcgttctcgctgataaacggctgaagactccagacggtgccaacgccttctcctttatgcagtccctgaactaccaggaagataaacaccaccatgatggagatttgcaccagtacaaacagggtattgaagttagcgaccaggttgacgctcttcagattcgcggcggttaaaatggcgacgaaggttaccacccacacccacggcggcacttccgggaagagggcggagagatagattttcgccaacaagacgttaatcatcggcaaaaagagataatccagcaggctactccagccgaccataaatccgacgtgcgggttaatgctcttttgcgcgtaggtataggcgctaccggcctccggaaactggcgaaccagtttgccgtagctgatagcggtaaacagcacacccgccagcgccagcaaataggacgccggaacgtgaccgtcgctaatgccggagacaataccaaaagtatcaaatacggtcatcggcgtgagataggccagacccatcatcaccacctgccacaatttcagactttttcgcagacgggttttgccgggttgcgcagcaatattcagtggactattaatagccataattgctgcctcccctgcgtaataaggtttgcggtcgtgtcgacctgaaatcaaacctgtttagcaagggaagcaaagggggcggagtccagtcagtagcaggaggggcgcatacgcagcctccctcgccatgcggggatttaatcatcggcatcatctcatttcctcgtcacagtcttaatcgttaacggaagcccgttgccgcccgcgctccataacgcgacatccgggaaatgtctggattaccagcaaatgtcaggcctggctccgctcaggccgatgaaacaaccccgcaaggggtattacgcgtttttcaacatccactcaatttctgtttctgtgatgaggcgctcaaactgcaacagctcatcatttttacaggcgtgatagacatggcagaagcgttcgcctaaatagcggcgcaggtgatcattctcgataaactcacccagggcatcgctctggcgaatcggaaagggtaagccttcctgttccagcccgttgccttcgacttcttcctgcaacggcagctcgttatcaaggccatgcaaaataccggcaaaaatcgctgccatcaccagatatgggttggcatcggcacccgccacgcgatattccacgcggtgattatgacggtcgccgcacggaatacgcagggcgacggtgcggttgttatggccccagctcgcctgcgtcggcacatacattcccggctggaagcggcgatagctgttcacgtttggtgccagcaacgccatgctgctcggcatcaggtcaatcatcccggcgagcatctttttcagcagcgggctatcttcgccttccgcgtcagaaagcacgttctcgccacgattattttgcatactgatatggatatgcattccgctgcccgcgtgctcttcatacggcttcgccataaaagtggcgtgcatcttatgcttttctgccatcagacgcaccaggcgttttagtgccagcgcatcatcgcaggcttccagcacgttatcagtatggtaaaggttgatttcaaactgacccgggctggcctcagcgaccgcgccatctgccggaatcagctgtaactgcgccagttcatcaatatcattgagcacgtcggcgaagtggttgaggttatcaacggagtaaacctggctttgtgtattgcggtcatcggtgccaggcgcgcagggcggttgcagatacccttcagcgtcgcgctggcgatccagtaaatagaactccagctctaccgctacgaccgggaacaatccgcgctggcgcagctgctgccacaggcggttaagaacgttccgcggctcaacgtcaaagggagcgccatcttcatcgaccatggtcaggagcatctgaccgataaactctggatcggcggcagaaggagttaaggaaccgagaacaggaacacaggtacgatccggctcgcccatttcctgacccagacctgcttcttctactacgttgcccagaatatccattgcaaatacgctggccgggaaataacaccctttctcgagcttcttcaggctactaacaggaatacgctttccacggaagcaaccatttaaatcggtaagtaaaacatcaacatattgcgtattcgggtagcgctccaggtagcgtttcacttcctgcgtaaaggcgctaccccgcctctcttcactctgctgaacaaagttctctacttcaacgatattggtttccatgattcttcgcctttggtttgttttccgctcgttatcaaagcgtaaaatataatgaccaccattcgaatctgtatgcaaactaaatgtttgtcaaatgttaaattgagtttgcaaaaatgaaaacccactgctagattgaaaaaatattgaacataaaggtcatttaaagcgcagtaatggcgataatttagtccactttgtgagattgagcatggaaaatataatgaacaatccggttatcggtgtcgtaatgtgcaggaacaggcttaagggtcatgcgacccagactctgcaagaaaagtacctgaatgccatcatccatgcaggcggcttgcctattgcgctaccacatgcgctggcggaaccgagtttacttgaacaacttttgccgaaactcgatggcatttatcttcctggtagtcccagcaatgtgcagccgcacctatatggtgaaaacggcgatgagcctgacgccgatcccgggcgtgatcttctgagcatggcgataattaatgccgcactcgaaaggcgcatccccattttcgccatctgccggggtttacaagaactggtggtggcaaccggtggtagcttgcatcgcaagctgtgcgaacagcctgaattgctggaacatcgggaagatcccgaactgccggtggaacagcaatatgcaccgagccatgaagttcaggttgaagaggggggattactgtctgcgttgttacctgaatgtagcaacttttgggtaaactctctacatggacaaggggcgaaggtcgttagcccacggttgcgtgttgaagctcgcagcccggatggcttagttgaggcggttagcgtcatcaatcatccttttgcgctgggcgtacagtggcacccggaatggaacagtagcgagtacgcgcttagccgtatattgttcgagggctttatcaccgcttgtcagcaccatatcgctgaaaaacagcgactctgaccactacagtttaaggaaatgcaaatatgagtgatgagggactggcgccaggaaaacgcttgagcgaaatccgccagcagcaggggcttagtcaacgtcgtgccgccgaactctccgggctgactcacagtgctatcagtacgatagaacaagataaagtcagccctgccatcagtacgctgcaaaagctgctgaaggtgtatggtctgagtctcagcgaattcttttccgagccggaaaaacctgatgagccgcaggtcgtcattaatcaggacgacttaattgagatgggtagtcagggtgtgagtatgaagctggttcataacggtaacccgaatcgcacgctggcgatgatctttgaaacgtaccagccgggcacaaccactggggaaagaattaagcatcagggtgaggaaataggcactgtactggaaggtgaaattgttctgacgattaatggtcaggattaccacctcgtcgcggggcaaagttatgccattaataccggcatcccgcacagtttcagtaatacgagcgcaggtatttgccgaattatcagcgcccatacgcccaccacgttttaatctttttgttctgtaagccgggtaagcgcaatgcgcccggcaatctatacacaaaatcattcaagttgcatcaaggcggcaagtgagcgaatcccgatgagcttactcaggtaagtgattcgggggagcgaacgcagccaaggcagaggcggcttgaaggatgaagtgtatataaagaatgtcgccagaaataaacgggcatacggcccggggatctctgcgccctgacgttcacaaactgcatatatctgatagacgtgaaacaggagtcataatgaattttcatcatctggcttactggcaggataaagcgttaagtctcgccattgaaaaccgcttatttattaacggtgaatatactgctgcggcggaaaatgaaacctttgaaaccgttgatccggtcacccaggcaccgctggcgaaaattgcccgcggcaagagcgtcgatatcgaccgtgcgatgagcgcagcacgcggcgtatttgaacgcggcgactggagtctctcttctccggctaaacgtaaagcggtactgaataaactcgccgatttaatggaagcccacgccgaagagctggcactgctggaaactctcgacaccggcaaaccgattcgtcacagtctgcgtgatgatattcccggcgcggcgcgcgccattcgctggtacgccgaagcgatcgacaaagtgtatggcgaagtggcgaccaccagtagccatgagctggcgatgatcgtgcgtgaaccggtcggcgtgattgccgccatcgtgccgtggaacttcccgctgttgctgacttgctggaaactcggcccggcgctggcggcgggaaacagcgtgattctaaaaccgtctgaaaaaagtccgctcagtgcgattcgtctcgcggggctggcgaaagaagcaggcttgccggatggtgtgttgaacgtggtgacgggttttggtcatgaagccgggcaggcgctgagccgtcataacgatatcgacgccattgcctttaccggtagtacccgtaccgggaaacagctgctgaaagatgcgggcgacagcaacatgaaacgcgtctggctggaagcgggcggcaaaagcgccaacatcgttttcgctgactgcccggatttgcaacaggcggcaagcgccaccgcagcaggcattttctacaaccagggacaggtgtgcatcgccggaacgcgcctgttgctggaagagagcatcgccgatgaattcttagccctgttaaaacagcaggcgcaaaactggcagccgggccatccacttgatcccgcaaccaccatgggcaccttaatcgactgcgcccacgccgacagcgtccatagctttattcgggaaggcgaaagcaaagggcaactgttgttggatggccgtaacgccgggctggctgccgccatcggcccgaccatctttgtggatgtggacccgaatgcgtccttaagtcgcgaagagattttcggtccggtgctggtggtcacgcgtttcacaagtgaagaacaggcgctacagcttgccaacgacagccagtacggccttggcgcggcggtatggacgcgcgacctctcccgcgcgcaccgcatgagccgacgcctgaaagccggttccgtcttcgtcaataactacaacgacggcgatatgaccgtgccgtttggcggctataagcagagcggcaacggtcgcgacaaatccctgcatgcccttgaaaaattcactgaactgaaaaccatctggataagcctggaggcctgaaatgaccgaacataccagcagttactacgccgccagtgcgaataaatatgcaccattcgacacgctgaatgagagtatcacctgcgacgtttgcgtggttggcggcggctataccgggctctcctccgcgctgcatctggcggaagcgggctttgacgtagtggttctcgaagccagtcgcatcggctttggcgcaagcgggcgcaatggcggacagcttgtgaactcctacagccgcgacatcgacgtgatcgaaaaaagctacggcatggacaccgcccgtatgctcggcagcatgatgttcgaaggtggtgagatcatccgcgaacgtatcaaacgttatcagattgactgcgactaccgccccggcggcctgtttgtggcgatgaatgataaacagctcgccacacttgaagagcagaaagagaactgggaacgctacggcaataaacagctggaattgctggacgccaacgccattcgccgtgaagtagccagcgatcgctataccggtgcgctgctggatcacagcggtgggcatattcatccgctaaaccttgccattggcgaagcggacgccatccgcctcaacggcgggcgcgtgtatgaactttctgccgtgacgcagatccagcacaccacgccagccgttgtgcgaactgccaaaggtcaggtgacggcgaagtatgtgattgtcgccgggaatgcgtatctgggcgataaagtagagccggaactggcgaaacgcagcatgccgtgcggcacgcaggtgatcaccaccgaacggctgagcgaagatttagcccgtagcctgatcccgaaaaactactgtgtggaagactgtaactatctgcttgattactaccgtcttaccgccgacaaccgcctgctgtacggcggcggcgtggtctacggcgcgcgcgacccggatgacgttgagcgccttgtggtgccgaaactgctgaaaaccttcccgcagctgaagggcgtgaaaattgattaccgctggacgggcaacttcctgctgaccctgagccgtatgccgcagtttggtcgcctcgataccaacatctattacatgcagggctacagcggccacggcgtgacctgtactcatctagccggacgtttgattgccgaactgctgcgcggcgacgccgaacgtttcgatgccttcgccaatctgccgcattacccgttccccggcgggcgcacgctgcgtgtgccgtttaccgcgatgggcgcggcgtattacagcctgcgcgatcgtctgggcgtttaattttcgattaaccgtgaagagtcaaaaggtgtgaaacatgagcaacaatgaattccatcagcgtcgtctttctgccactccgcgcggggttggcgtgatgtgtaacttcttcgcccagagcgctgaaaacgccacgctgaaggatgttgagggcaacgagtacatcgatttcgccgcaggcattgcggtgctgaataccggacatcgccaccctgatctggtcgcggcggtggagcagcaactgcaacagtttacccacaccgcgtatcagattgtgccgtatgaaagctacgtcaccctggcggagaaaatcaacgcccttgccccggtgagcgggcaggccaaaaccgcgttcttcaccaccggtgcggaagcggtggaaaacgcggtgaaaattgctcgcgcccataccggacgccctggcgtgattgcgtttagcggcggctttcacggtcgtacgtatatgaccatggcgctgaccggaaaagttgcgccgtacaaaatcggcttcggcccgttccctggtagcgtgtatcacgtaccttatccgagtgatttacacggcattagtacacaggactccctcgacgccatcgaacgcttgtttaaaagtgacatcgaagcgaagcaggtggcggcgattattttcgaaccggtgcagggcgagggcggtttcaacgttgcgccaaaagagctggttgccgctattcgccgcctgtgcgacgagcacggtattgtgatgattgctgatgaagtgcaaagcggctttgcgcgtaccggtaagctgtttgccatggatcattacgccgataagccggatttaatgacgatggcgaaaagcctcgcgggcgggatgccgcttagcggcgtggtcggtaacgcgaatattatggacgcacccgcgccgggcgggcttggcggcacctacgccggtaacccgctggcggtggctgccgcgcacgcggtgctcaacattatcgacaaagaaagtctctgcgaacgcgcgaatcaactgggccagcgtctcaaaaacacgttgattgatgccaaagaaagcgttccggccattgctgcggtacgcggcctggggagcatgattgcggtagagtttaacgatccgcaaacgggcgagccgagtgcggcgattgcacagaaaatccagcaacgcgcgctggcgcaggggctgctcctgctgacctgtggcgcatacggcaacgtgattcgcttcctgtatccgctgaccatcccggatgcgcaattcgatgcggcaatgaaaattttgcaggatgcgctgagcgattaatagcccaacgcaataatgtctgatgcgctgcgcttatcaggcctgcaaacgacgtattgattatgtatgccgaataaagcattcacgccgcatccggcaagttgtattgctcaacttcgttaaatctggtgctttttcaacaacgcgcggaactgatgataagttaaccccagtaattcagccgcgcgcttctggttatatttcccttgttgcaaactgagttgcagcaactctttttcctgctgcatctgaaactcacgtaaatccagcggcagtgttggaaggctggtggtttcactaacggcgatagcgtcttcaggcggacgccgtttaaagggatcaataatgatgtcatcaagcggataatcgctggtgccgtggcgatacacactacgttccaccacgtttttcaattcacgaatatttcccggccaacgataattcagcaatgtttctctggcgcgctccgtaaaccccgggaacagaggcagcttgatttcccgacacatctggatggcaaagtattctgccatcaacattatgtcgctttcgcgctcgcgcagtggtggcagttgtacaacatcaaaagccagtcggtcgagcaggtcagcgcgaaaagtgccttcattgaccatcgccgggagatcggcattcgtcgcgcataccaaccgcacattcacctgcaatggttggctgccgccaacgcgctccagttcaccgtactcaatcacgcgcaataatttctcctgcaccatcatcggtgccgtagcgagttcatcaagaaatagcgtaccgccgtcggcacgttcaaatctccctggatgacgtttttgcgcaccggtaaacgcccccgcttcgtgaccaaacagttcggaatccagcagattttcatttaacgccgcgcagttaagggaaataaacggcccttgccaacgggaggagagataatgcaggcggctggcaatcagctctttaccggtgccgcgttcgccgatgatgagcaccggtttgtccagcggtgcgagatggctaacctgttccagcacttcgagaaagctgttcgcctcaccaagtaaattatctttgtattctgccatgatgaaattcgccacttgttagtgtaattcgctaactcatcctggcatgttgctgttgattcttcaatcagatctttataaatcaaaaagataaaaaattggcacgcaaattgtattaacagttcagcaggacaatcctgaacgcagaaatcaagaggacaacattatgggtattttttctcgctttgccgacatcgtgaatgccaacatcaacgctctgttagagaaagcggaagatccacagaaactggttcgtctgatgatccaggagatggaagatacactggttgaagtacgttctactagcgcgcgcgcgttggcagaaaagaaacagctgactcgccgtattgaacaagcgagcgcgcgtgaggttgaatggcaggaaaaagccgaactggcgctgctgaaagagagagaggatctggcacgtgcagcgttaattgaaaaacagaaactgaccgatctgattaagtccctggaacatgaagtgacgctggtggacgatacgctggcacgcatgaagaaagagattggcgagctggaaaacaaattgagcgaaacacgcgctcgccagcaggcattgatgttacgtcatcaggcggcaaacagcagccgcgatgtgcgtcgtcagctggacagtggcaaactggatgaagcaatggctcgtttcgaatctttcgaacgtcgtattgaccagatggaagcggaagcagaaagccacagcttcggtaaacaaaaaagcctggacgatcagtttgccgaactgaaagccgatgatgcaatcagcgaacaactggcacaattaaaagccaaaatgaagcaagacaatcaataataacatccaggcggcgtccgaacgcgccgccgctcatcgtctaaggagtacttatgagcgcgctatttctggctattccgttaaccatttttgtgctgtttgttttaccgatctggttatggctgcattacagcaatcgttctggtcgcagtgaattgagccaaagtgagcagcagcgattagcgcaactggctgatgaagcaaaacggatgcgcgaacgtattcaggcgctggaatctattcttgatgcagaacatccgaactggagggatcgctaatggcgggcattaatctcaataaaaaattatggcgtattccacagcagggcatggtccgcggcgtctgcgccgggattgccaactattttgatgtaccggtaaaactggtgcgtatcctggtggtgctgagcattttcttcggtctggcgctgtttaccctggttgcttacatcattttgagttttgcgcttgatccaatgccggacaacatggcctttggtgagcagctaccttccagcagcgaattgctggatgaagtcgaccgtgaactggcggcaagtgaaacgcgtttacgcgagatggaacgttatgtcacttccgatactttcacgttacgtagccgtttccgtcaactgtgaggaaagttatgaatactcgctggcaacaggccgggcaaaaggtaaagcctggtttcaaattagcaggcaagctggtacttcttaccgcactgcgctatggcccggcgggtgtggcgggctgggcgataaaaagtgttgctcgccgaccgctgaaaatgttgctggctgtggcgctggaaccgctgttaagtcgggctgctaataaactggcacagcgttataaaaggtgaggggagtttcgcaaaaattgttaaatctcaggcgtataatggatggcaattttcatccatagaaggacgcttacatgtttaaaaaaggcttacttgctctggcactggtgtttagtctgcccgttttcgccgctgaacactggatcgatgttcgtgttccagagcagtatcagcaagagcacgttcagggggccatcaatattcccctgaaggaagtgaaagagcgcattgccaccgccgttccggataaaaacgacaccgtgaaagtgtattgcaatgccggacgccagagtgggcaagcaaaagagatccttagcgagatgggatatacccacgttgagaacgccggtggcctgaaagacatcgcaatgccgaaggtcaaaggttaaaagaattcaccatgagcggcgcttatgcgccgtttttttttctgtcacaccttatttacatccccatagattatttgcgtcagctcacaaatacgctttttccctggtaaaaaatgatttcctgcgtgactaaaacccttgtgctcaattgacagtttattttctgcggagtagtctctcgtttcatgggaccgctaccacggaaaggcaacatgaaacagaaaattacggattacctggacgaaatctacggtggaacatttaccgcaactcatttacagaaacttgtaacgcgtcttgagagtgcgaaacgattaattacacagcgacgtaaaaaacactgggatgaaagtgatgtcgtgttaattacctatgccgatcaatttcacagcaatgatttaaaaccattacccacatttaatcagttttaccatcaatggctgcaaagcatttttagtcatgttcatttgttgccgttttatccatggagttctgatgatggctttagcgtaattgattatcatcaggtcgccagtgaagcgggggagtggcaggatattcagcaactcggtgaatgcagtcatttaatgtttgattttgtctgcaaccatatgagcgcaaaaagtgaatggtttaaaaactatttacaacagcatccaggttttgaagatttttttattgccgttgacccgcaaaccgatctcagcgccgtcactcgcccgcgtgcgttaccgttattaacgccattccagatgcgcgatcatagtacgcgccatttatggaccacctttagtgacgatcaaattgacctgaattaccgtagccctgaagtgttgctggcgatggtggatgttttactctgttaccttgcgaaaggtgctgagtatgtccgcctggatgccgttggctttatgtggaaagagccgggaacaagctgcatccatctggaaaaaacacatctgattatcaaactgttacggagcattattgataacgttgcgccaggtacagtgatcattaccgagaccaatgttccgcataaagacaacattgcttactttggcgcaggcgatgacgaagcacatatggtgtaccagttcagcctgccgccactggtgctgcatgcggtgcaaaaacagaacgttgaggcgctttgtgcgtgggcgcaaaacctgacactaccttccagcaacaccacctggtttaacttcctcgcctctcacgatggcatcgggctaaacccgctacggggcttgttgcctgaaagcgaaatattagagctggtcgaggcgttacagcaggaaggtgcattagtaaactggaaaaataatcccgacggtacacgcagtccgtatgaaataaatgtgacctatatggatgcgttaagccgccgtgagagtagcgatgaagaacgttgcgccaggtttatccttgcccatgcgattttgttaagtttccccggtgtgccagcgatatatattcaaagtattcttggcagccgtaatgattacgcaggtgtcgaaaaactcggatataaccgtgcgattaaccgtaaaaaatatcacagtaaagagataacccgagaactgaacgatgaagctacattaaggcatgcggtatatcatgagttgagccgtttaattacacttcgtcgcagccataacgagtttcatccggataataattttaccattgatacgattaatagttccgtaatgcgtattccaagaagtaacgctgatggtaattgtctgactggattgtttaatgtcagtaaaaatattcagcatgtaaatattactaatctgcatggtcgggatctgattagtgaagttgatatattgggtaatgaaataacgctgcgcccctggcaggttatgtggattaaataaaaaggaacatctcatgattaaaagtaaaatcgtgctgttaagtgcactggttagttgcgccctgattagtggctgtaaagaagaaaataaaacgaatgtatccatcgaatttatgcattctagcgtggagcaggagcgccaggccgttatcagtaaattgattgcccgttttgaaaaagaaaaccctggcatcaccgttaagcaagtgcccgtggaagaagatgcctataacactaaagtcattactcttagtcgtagcggtagcctgccggaagtgatcgaaaccagccatgactacgccaaagtgatggacaaagagcagcttatcgatcgcaaagcggttgccacagtcatcagcaacgttggtgaaggcgcgttttacgatggcgtactgcgtattgtgcgtaccgaagatggtagcgcatggaccggtgttcctgtcagcgcctggattggcggtatctggtatcgcaaagatgtgctggcaaaagcggggcttgaggagccgaaaaactggcaacagctgctggacgttgcacagaaactgaatgacccggcgaataaaaaatacggcattgcgctgcctacagcagaaagcgtgttgacggaacaatccttctcccagtttgcgttatccaaccaggctaacgtctttaacgccgaaggcaaaatcacccttgatacaccagagatgatgcaggcactgacctattaccgcgaccttactgccaacactatgccgggttctaacgacatcatggaagtgaaagacgcctttatgaacggcaccgcgccgatggcgatttactccacctatatccttccggctgtgattaaagaaggcgacccgaaaaacgtcggtttcgtggtgccaaccgagaaaaactctgcggtctacggcatgttgaccagcctgaccattaccgccgggcaaaagaccgaagagacggaagcagcagaaaaatttgtcacctttatggagcaggcagacaacattgccgactgggtgatgatgagcccaggtgctgcgctgccggtgaataaagcggtggtgactaccgccacctggaaagacaacgacgttattaaggcgctgggtgaactaccgaatcagctaatcggtgaactgccaaatattcaggtttttggcgcagtaggggataaaaactttacccgcatgggtgatgtgacgggttctggcgtggtgagtagtatggtgcataacgtcaccgtgggtaaagccgatctctctactacgctgcaagcgagccagaaaaaactggatgaactgatcgaacagcactaaacccaggacaggaatccgcaatgaacaggctttttagtggtcgttccgatatgccctttgcgctgctgcttctcgcgcccagcttattactgctgggcggtctggtggcgtggccgatggtgagcaatatcgaaatcagttttttacgtctgccgctcaatcccaacatcgagagtacgtttgttggggtgagcaactatgtgcgtatcctctccgatcccggcttctggcatagcctgtggatgacggtctggtataccgcgctggtggtggcgggcagcaccgtgctcgggctggcggtggcgatgtttttcaaccgcgagttccgcctgcgcaaaaccgcgcgtagcctggtgatcctctcctacgtaacgccgtccattagcctggtgttcgcctggaaatacatgttcaacaacggctacggcattgttaactacctcggcgtcgatcttctgcatctctatgagcaggcaccgctgtggttcgataatccgggcagtagctttgtgctggtggtgctgttcgccatctggcgctacttcccgtatgcctttatcagctttctggcgattttgcagaccatcgacaaaagcctgtacgaagcggcagagatggatggcgctaatgcctggcaacggtttcgtatcgtcacgctgcccgcaattatgccggtcctggcgacggtggtgacactgcgcaccatctggatgttctacatgttcgcggatgtttatttgctgacgaccaaggtcgatattctcggtgtatatctctacaaaaccgcctttgcctttaatgatttaggaaaagcggcggcgatcagcgtggtgctcttcatcattattttcgctgtcattctgctgaccaggaaacgggtgaacctcaatggcaacaaataaacgcacactcagtcgcatcggtttttactgcgggctggcgctgtttctcatcatcacgctgtttccattttttgtgatgctgatgaccagcttcaagggcgcgaaagaggcgatcagtctgcatcctacgctgctgccgcagcagtggacgctggagcattacgtcgacatttttaacccgatgattttcccgtttgtcgactacttccgtaacagtctggtggtgtctgtggttagttccgtggtggcggtattcctcggcattcttggggcttacgcgctttcccgcctgcgctttaaaggtcggatgaccatcaacgccagcttttacacggtgtatatgttctctggcattttgctggtggtgccgcttttcaaaatcatcaccgcgcttggcatttacgacactgagatggcgctgatcatcaccatggtgacgcaaactctgcccaccgccgtgtttatgctgaaaagctacttcgacaccatccccgatgagatcgaagaagcggcgatgatggatggcctcaaccgtctgcaaattatcttccgcatcaccgtgccgttggcgatgtccgggctgatatccgtgttcgtctactgctttatggtggcgtggaacgactatctgtttgcgagcattttcctctccagcgccagcaatttcaccttaccggtgggcctgaacgcgctgttcagtacgccagattacatctggggacggatgatggcggccagtctggtgaccgcattgccggtggtgattatgtatgcgcttagcgaacgttttattaagagtggtttgaccgccggtggcgtgaagggctaaagcggccagtttctttacaaggagttttaaatgaaaaagttagtagccacagcaccgcgtgttgctgcgctggttgagtatgaagatcgggcgattttagctaatgaagtgaagatccgcgtgcgtttcggcgcaccgaaacacggaacggaagtggtcgacttccgcgccgccagcccgtttattgatgaagactttaacggcgaatggcagatgttcactccgcgtccggcagatgcgccgcgcggcattgagtttggcaaattccagcttggcaacatggtggttggcgacattatcgagtgcggcagcgacgttaccgactacgcggtgggcgacagcgtatgcggctacggcccgctctccgagacggtcatcattaacgcagtgaataactacaagctgcgcaaaatgccgcaaggcagctcctggaaaaacgccgtctgctacgacccggcgcagtttgccatgagcggcgtgcgcgatgccaacgtgcgcgtaggggattttgtggtggtggtagggcttggcgcaatcggtcaaattgccatccaactggctaaacgcgctggcgcttctgtggtgattggcgtcgatcctatcgcccatcgctgtgatattgcccgtcgccacggcgcggatttctgccttaaccccatcggcactgatgtaggtaaagagatcaaaacgctgaccggcaagcagggtgccgatgtgattatcgaaaccagcggctacgccgacgcgctgcaaagcgcgctccgcggtctggcttatggcggcaccatctcctatgtcgcgtttgccaagccgtttgccgaaggttttaacctcggacgcgaagcgcatttcaataacgccaaaattgtcttctctcgcgcgtgcagcgaaccgaacccggattatccgcgctggagccgcaagcgtattgaagaaacctgttgggaactgctgatgaacggttatctcaattgcgaagatttaatcgacccggtggtgacctttgccaatagcccggaaagctatatgcagtatgtcgaccagcatccggaacagagcatcaaaatgggcgttacgttttaattcaaaggaatgaaaaaaatgaaaatcggcacacagaatcaggcgttctttccggaaaacattctggagaaatttcgttatatcaaagagatgggcttcgatggttttgagattgacggcaaactgctggttaacaacatcgaagaagtcaaagcggcgatcaaagaaaccggtttaccggtgaccaccgcctgcggtggctatgacggatggattggcgactttatcgaagagcgtcgtcttaatggcttaaagcagatcgagcgcattctcgaagcgctggcagaagtgggcggtaaaggcatcgtcgttccggctgcgtggggcatgtttaccttccgcttaccgccgatgaccagcccgcgtagcctggacggcgaccgcaaaatggtgagtgattccctgcgcgtactggaacaggtcgccgcgcgtaccggaaccgtggtgtatctcgaaccgttaaaccgctatcaggatcatatgatcaacaccctcgccgatgcccgccgttacatcgtcgaaaacgatcttaaacatgtacagattatcggcgatttctatcacatgaatatcgaagaagataacctggcgcaggcgctgcatgacaaccgcgacctgctcggtcatgtgcatattgcggataaccatcgctaccagccgggcagcggcaccctggatttccacgcgctgtttgaacagctgcgcgcggataactatcagggctatgtagtgtacgaagggcgtatccgggcggaagatcctgcccaggcgtaccgtgatagcttggcctggttgcgtacctgctaagaggtctttgtgaaaagtgcaatgacaagctctccgctgcgggtcgcgataataggcgcaggccaggtggcggataaggttcatgctagctactactgcacccgcaacgatctggaactggtggctgtctgtgacagccgcctttcccaggcgcaggcgctggcagaaaaatacgggaatgcatccgtgtgggacgatccgcaggccatgctgctggcggtgaaacctgatgtggttagcgtctgcagtcctaaccgttttcattacgaacataccctgatggcactggaagcgggctgccatgtgatgtgcgaaaaaccgcccgccatgacgccagaacaggcgcgggaaatgtgcgataccgcgcgcaaactgggcaaggtgctggcctacgactttcaccatcgttttgcgctcgatacgcaacagctgcgtgaacaggtgaccaacggcgttttgggagagatttacgttaccaccgcccgcgccctgcgtcgctgcggcgttcccggctggggtgtctttaccaataaagaactgcagggtggtggcccgctgatcgacatcggcattcatatgctggatgctgcgatgtatgtgctgggctttccggcggtgaaaagcgtgaatgcgcatagctttcaaaagatcggcacgcaaaagagctgtggtcaatttggtgagtgggatccggcaacttacagcgtcgaagatagcctgtttggcaccattgaatttcataacggcggcattctgtggctggaaacgagttttgcactcaacatccgcgaacagagcattatgaacgtcagcttttgtggtgataaagctggtgcgacgctgtttccagcacatatctacaccgataacaacggtgaattaatgacgctgatgcaacgggaaatagcagacgacaaccgccatttgcgcagcatggaagcctttatcaatcacgtacagggcaagcccgtgatgatagccgacgccgagcaggggtacatcatccagcaactggtggcggcgttgtatcaatccgcagaaacagggacgcgtgtggaattatgaccaggccagtaacgttaagtgaaccccatttcagccagcataccctgaacaagtatgcaagcctgatggcgcaggggaacggctatcttgggcttcgcgccagccatgaagaagattacacgcgccagacgcgaggggtgtatctggcggggctgtatcatcgggcgggaaaaggtgaaatcaacgaactggtgaacctgcctgatgtcgtggggatggagattgccataaatggtgaggttttcagcttatcccacgaagcctggcagcgtgagcttgactttgccagtggcgaattacgccgcaatgttgtctggcgtaccagcaacggcagtggttacaccatcgccagccgtcgctttgttagcgcagaccaactgccgctcattgcgctggaaatcactattacgccactggacgccgacgcgagtgtgctgattagtacaggcattgacgccacgcaaaccaatcacggtcgccaacatctcgacgaaacccaggtgcgggtgtttggtcagcatctgatgcaggggagctacaccacccaggatggacgcagtgatgtggccatcagctgttgctgtaaggtgagcggtgatgtgcagcaatgctataccgccaaagagcgccgtttactgcaacataccagtgcgcagcttcatgcaggcgagacaatgacgttgcaaaaactggtgtggatcgactggcgggatgacaggcaagctgctttagacgagtggggcagcgcgagccttcgccagcttgaaatgtgcgcgcagcagagttacgaccaacttcttgcagcaagtacagaaaactggcgtcaatggtggcagaaacgtcgtatcacggtaaatggcggcgaagcgcacgatcagcaagcgttagattatgcgctttatcatctgcgcatcatgacgcctgcccacgacgagcgcagcagcattgcggcaaaaggcttaaccggcgaaggctacaaaggccacgttttctgggatacagaagtatttttgttaccgtttcatctgtttagcgatccgacggttgcccgaagtttactgcgttatcgctggcacaacttgccaggcgcgcaggagaaagcgcgacgcaacggctggcagggcgcgctatttccgtgggaaagcgcgcgcagcggcgaagaagagacgccggaatttgccgccattaacattcgcaccgggctgcggcaaaaagtggccagcgcgcaggcggaacatcatctggtggccgatatcgcctgggcggttattcaatactggcagaccacgggggatgaaagtttcattgcgcatgaaggcatggcgctacttctggagacggcaaagttctggattagccgcgcggtgagagttaacgatcgtctggaaattcatgatgttattgggccagacgaatataccgaacatgtcaataataatgcatacaccagctatatggcccgctacaacgttcaacaggcgctgaatattgcccgccagttcggctgtagcgacgatgcgtttatccatcgcgccgaaatgttcctcaaagagctatggatgccagaaattcagcccgacggcgttttgccgcaggatgatagctttatggctaagccggcgattaatctggcgaaatacaaagcggcggcggggaagcaaaccatactgctggattatagtcgcgcagaagtgaacgagatgcagatcctcaaacaagctgatgtggtgatgctcaattacatgctgccggagcagttcagtgcggcaagctgtcttgccaatctgcaattttatgaaccgcgcactattcacgacagcagtttaagtaaagcaatccacggcattgttgccgcacgctgtggcctgctgacccaaagttatcagttctggcgcgaggggactgaaatcgatcttggtgctgatccgcatagttgtgatgatggtatccatgctgccgcaactggcgctatctggctgggggcgattcagggttttgccggggtgagcgtgcgtgacggtgaattgcatctcaatccggcgttacctgagcagtggcaacagttgtctttccctctgttctggcagggctgcgaattacaggtcactcttgacgcgcagcgtattgcgattcgaacttctgcgcccgttagtctgcgtttgaacggtcagcttataaccgtggctgaagaatctgttttctgtttgggtgattttattttgcccttcaatgggaccgctaccaaacatcaggaggatgaatgaaactgcaaggggtaattttcgatctggatggtgtaatcaccgataccgcgcatctgcatttccaggcgtggcagcagattgccgctgaaattggcatcagcattgatgcgcagtttaacgaatccctaaaagggatcagccgcgatgagtctctgcggcgcattctgcaacacggggcaaagagggcgactttaacagccaggagagggcgcaactggcgtatcgcaaaaatctgctctatgtccacagtctacgcgagttgacggtcaacgctgttctacccggcattcgctctttgctggcagatctccgtgcacagcagatcagcgttgggctggcttctgtctccctgaatgcgccgacgattttagcggcgctggagctgcgcgagtttttcaccttctgcgcggatgcttcccaacttaaaaacagcaaaccggacccggaaatctttctcgccgcctgtgcagggctgggcgtgccgccgcaggcatgtatcggcattgaagatgcgcaggcgggcattgacgccattaacgccagcggtatgcgcagcgtggggatcggcgcgggcttaaccggggcgcaattactgttgcctagtacggaaagtctcacctggccgcggttaagcgccttctggcaaaacgtataacaaaggaatcaacatggctcagcttagcttacaacatattcaaaaaatctacgataaccaggtgcatgtggtgaaggacttcaacctggaaattgccgataaagagttcatcgtgtttgtcggcccgagcggctgcggtaagagcaccaccctgcgcatgattgccgggcttgaggagatcagcggcggcgatctgttgatcgacggcaaacgaatgaatgacgttccagccaaagcacgcaatatagcgatggtgttccagaactacgcgttgtatccgcatatgacggtttacgacaacatggcgtttggtctgaagatgcaaaaaatcgccaaagaggtgattgatgagcgggtgaactgggcggcgcaaattctcggcctgcgtgagtacctgaaacgtaagccgggggcgctttccggcgggcaacgtcagcgagtggcgcttgggcgggcgattgtacgcgaagcgggcgtgtttttaatggatgaaccgctctctaaccttgatgccaagctgcgcgtgcaaatgcgcgcagagatcagcaagctgcatcagaaactgaacaccaccatgatctacgtgacccacgatcagaccgaagcgatgaccatggcgacgcggattgtgattatgaaagacgggattgttcagcaagtaggtgcgccgaaaaccgtttataaccaacccgcgaatatgtttgtttccggatttattggaagtccagcgatgaattttattcgcggcacgatcgatggcgataaattcgttacggaaacgcttaaattaaccattcccgaagagaaattagcggttctgaaaacacaggaaagtttgcataagcccatcgtgatgggaatacgaccggaagatattcatccggacgcgcaagaggaaaataacatttccgccaaaattagcgtggcagaattaaccggtgcggaatttatgctctacaccacggttgggggcacgagttaaacggttgggggcacgagttagtggtccgtgctggtgcgttaaatgattatcatgcaggagaaaatatcactattcattttgatatgacgaaatgtcatttctttgatgcagaaacggaaatagcaattcgctaaatacagggggaaggcattcccccaggataatacaaggaacaataatgaaaaagttattaccctgtaccgcactggtgatgtgtgcgggaatggcctgcgcacaggccgaggaaaggaacgactggcactttaatatcggcgcgatgtacgaaatagaaaacgtcgagggttatggcgaagatatggatgggctggcggagcctagtgtctattttaatgccgccaacgggccgtggagaattgctctggcctattatcaggaagggccggtagattatagcgcgggtaaacgtggaacgtggtttgatcgcccggagctggaggtgcattatcagttcctcgaaaacgatgatttcagtttcggcctgaccggcggtttccgtaattatggttatcactacgttgatgaaccgggtaaagacacggcgaatatgcagcgctggaaaatcgcgccagactgggatgtgaaactgactgacgatttacgtttcaacggttggttgagcatgtataaatttgccaacgatctgaacactaccggttacgctgatacccgtgtcgaaacggaaacaggtctgcaatataccttcaacgaaacggttgccttgcgagtgaactattatctcgagcgcggcttcaatatggacgacagtcgcaataacggtgagttttccacgcaagaaattcgcgcctatttgccgctgacgctcggcaaccacagcgtgacgccgtatacgcgcattgggctggatcgctggagtaactgggactggcaggatgatattgaacgtgaaggccatgattttaaccgtgtaggtttattttacggttatgatttccagaacggactttccgttagcctggaatacgcgtttgagtggcaggatcacgacgaaggcgacagtgataaattccattatgcaggtgtcggcgtaaattacagcttctgataatgggctaaattgccggatgcggcgcgagtactttatccgatctataaatgtaggccggataagatgcgctagcatcgcatctggcattcaggcaaggtagctggtatttatttcagcgtcatatgcgtggcaacggtaatattctgtggactcggttttccagaaattaagcggaataataactcgcagctttgttgacctaactcctgcgtcggaacatcgatgccgcccggtgcaggcgttaaaataaaactcagcgtttcattgctataacccaccaccgctaactgctgcggaatagcaatatttttctctgctgccgcacgataaatgctcattaatttcaggctgtcagtggcaaacaccgcctcaggcaacggactctggcttaataattgccgtgctgcttttaatgcagtttcatgggtataaccgccatcaacaatccattcatcacgcactgcaatattatgcgcagccaggctctgcttataaccattaacgcgatcaacgctaacatggacatcaagcggagcatgcaggcaggcaatattttgatgcccactttcaattaatgcatcggtcaacgcaatgctgtcgccaaaattatcggtatcgacagaataaacatgggcatattgaccttcaactttgccaatcaccaccaccggaatatcatatttatcgagttgggcaaaaaaactctcatccgctgggctactgagcataataatgcctttaatcattttctgcttaattttgctttcgcatttttgcagatcttctgccggattgtggctcgtttgtaatatcacgtcgaaaccttcttcttcagctttggcggtgatggcatgcaaaacttcagagaaaaacggattacccgccgtagttttggtgctacgggtagaaatcaccataatggcatcaaaaccgctagaggtcagcgcgcgggccagcttgtttggctgatactgtaattcttcaatgacccgtaacactttttcgcgcgcttccggggagatattagtttgcttattcagcacgcgacttacggtggatttacttacgcctgcaaccctggcaatatcataaatagtaggggacataggtcaggaactccgtccgaacgtgaatgctgcacatcttatggagttcgccggtcgatgacaacacgggcagttgataatcaatggcctggcccccacattcatatccttacgaatgattttttttctggtcttcagagcagcacaggacagcaatgaagcgacttaaaaatgaactcaatgcgctggtgaatcggggtgtcgacagacatctgcgcctcgctgtaaccggacttagccgcagcggcaaaacagcgtttatcaccgcgatggttaatcagttgcttaatattcacgccggagcacgtttgccgctgttaagtgcggtgcgtgaagagcgcctgctgggcgtgaaacgcattccccagcgtgactttggcattccgcgcttcacctatgacgaagggctggcgcagttatatggcgatccacccgcctggccaacgccaacgcgcggcgtcagtgaaatccgcctggcgctacgttttaaaagcaatgatagcctgctacgccactttaaggatacctccacgctgtatctggaaattgtggattatcccggcgaatggttgctcgacctgccgatgctggcgcaggactatttaagctggagccgccagatgacgggcttactcaatggtcagcgcggagaatggagcgcgaaatggcgaatgatgagcgaagggctggacccgctagcgcctgccgacgaaaaccggctggcggacattgccgccgcgtggaccgattatctccaccactgtaaagagcaggggctgcactttattcagcctgggcgctttgtcttgccgggagatatggcaggtgcgcccgcgctgcaattcttcccgtggccggatgtcgatacctggggcgagtccaaactggcgcaggccgataagcataccaatgccggaatgctgcgcgagcgctttaattattactgcgagaaggtggtgaaggggttctataagaatcattttctgcgctttgaccgccagattgtgctggtggattgcctgcaacctctcaacagtgggccacaggcatttaatgatatgcgtctggcactgacgcagctgatgcaaagttttcactacgggcagcgtaccctgttccggcgtttgtttagcccggttatcgataagctattgtttgctgccactaaagcggaccatgtgaccatcgatcagcacgctaatatggttagtttactgcaacaactgattcaggatgcctggcaaaatgcggcgttcgaagggatcagcatggactgcctggggctggcgagtgttcaggcgaccaccagcggcattattgatgttaacggtgagaaaatcccggcgctgcgtggtaatcgacttagcgatggcgcaccgctcactgtttatcctggcgaagttcccgcacgtttgcctggtcaggcgttctgggataagcaaggcttccagtttgaggcatttcgtccgcaggtgatggatgtcgacaaaccactaccgcatattcgtcttgatgctgcgctggaatttttaataggagataaattgcgatgaccgaaccgttaaaaccacgtattgatttcgacggtcctctggaggtcgatcagaatcctaaattcagggcgcagcagacctttgacgaaaatcaggcgcaaaattttgccccggccacgctcgacgaagcgcaggaagaagaggggcaagtcgaagcggtaatggacgcagcgttacgtccgaaacgcagcctgtggcgcaaaatggtgatgggagggctggctctgtttggcgcaagcgttgtcgggcagggtgtacagtggacaatgaatgcctggcaaacccaggactgggtggcgctgggtggatgtgccgctggggcattgattatcggcgctggcgtaggttctgcggtaacagagtggcggcgcttatggcgcttgcgacagcgcgcccatgaacgcgacgaagcgcgtgatttattgcatagccacggcacgggcaaaggccgcgcattttgcgaaaaactggcgcagcaggcgggtattgatcagagccatccggcgctgcaacgctggtatgccagtatccatgaaacgcaaaacgaccgtgaagtggtcagcctgtatgcgcatttggtccagccagttttagatgcccaggcgcggcgcgaaatcagccgtagcgcggcggaaagtacgttgatgattgcggtcagcccgctggcgttggtcgatatggcgtttatcgcctggcgcaatctgcgtttaattaatcgcatcgccacgctgtatggcattgaactggggtattacagccgtttgcgtctgtttaagctggtattgctgaatatcgcttttgccggagccagcgaactggtgcgcgaagtggggatggactggatgagccaagatctcgctgctcgtttgtctacccgcgcagctcaggggattggtgcaggacttctgacggcacgactcgggattaaagctatggagctttgccgcccgctgccgtggattgacgatgacaaacctcgcctcggggatttccgtcgtcagcttatcggtcaggtgaaagaaacgctgcaaaaaggcaaaacgcccagcgaaaaataatgcaatatcgggtgctgaccggatatctttacgccgaagtgcccgtttttccgtctttgtgtcaatgattgttgacagaaaccttcctgctatccaaatagtgtcatatcatcatattaattgttcttttttcaggtgaaggttcccatgcgtctggaagtcttttgtgaagaccgactcggtctgacccgcgaattactcgatctactcgtgctaagaggcattgatttacgcggtattgagattgatcccattgggcgaatctacctcaattttgctgaactggagtttgagagtttcagcagtctgatggccgaaatacgccgtattgcgggtgttaccgatgtgcgtactgtcccgtggatgccttccgaacgtgagcatctggcgttgagcgcgttactggaggcgttgcctgaacctgtgctctctgtcgatatgaaaagcaaagtggatatggcgaacccggcgagctgtcagctttttgggcaaaaattggatcgcctgcgcaaccataccgccgcacaattgattaacggctttaattttttacgttggctggaaagcgaaccgcaagatagccataacgagcatgtcgttattaatgggcagaatttcctgatggagattacgcctgtttatcttcaggatgaaaatgatcaacacgtcctgaccggtgcggtggtgatgttgcgaagtacgattcgtatgggccgccagttgcaaaatgtcgccgcccaggacgtcagcgccttcagtcaaattgtcgccgtcagcccgaaaatgaagcatgttgtcgaacaggcgcagaaactggcgatgctaagcgcgccgctgctgattacgggtgacacaggtacaggtaaagatctctttgcctacgcctgccatcaggcaagccccagagcgggcaaaccttacctggcgctgaactgtgcgtctataccggaagatgcggtcgagagtgaactgtttggtcatgctccggaagggaagaaaggattctttgagcaggcgaacggtggtagcgtgctgttggatgaaataggggaaatgagtccacggatgcaggcgaaattactgcgtttccttaatgatggcactttccgtcgggttggcgaagaccatgaggtgcatgtcgatgtgcgggtgatttgcgctacgcagaagaatctggtcgaactggtgcaaaaaggcatgttccgtgaagatctctattatcgtctgaacgtgttgacgctcaatctgccgccgctacgtgactgtccgcaggacatcatgccgttaactgagctgttcgtcgcccgctttgccgacgagcagggcgtgccgcgtccgaaactggccgctgacctgaatactgtacttacgcgttatgcgtggccgggaaatgtgcggcagttaaagaacgctatctatcgcgcactgacacaactggacggttatgagctgcgtccacaggatattttgttgccggattatgacgccgcaacggtagccgtgggcgaagatgcgatggaaggtagcctggacgaaatcaccagccgttttgaacgcagcgtattaacccagctttatcgcaattatcccagcacgcgcaaactggcaaaacgtctcggcgttagtcataccgcgattgccaataagttgcgggaatatggtctgagtcagaagaagaacgaagagtaagcgcgaatatgcctgatggtgcaacaccatcaggcatattaaattatgctttcagtacagccagagctgcttcgtaatccggctcggtggtgatttcatccaccagctggctgaaaatcacattgtcattttcgtcaataaccacaacggcacgcgctgccagacctttcagtgggccatcagcaattgccacaccgtaagcttgcagaaattcagcgttacggaaagtggagagggtgataacgttgttcagaccttctgcgccgcagaaacgagactgggcgaacggcagatcggcagagatacacagcacaacggtgttgtcgatctcagttgccagttggttaaacttacgtacacttgcggcgcaaacaccggtatcaatactcgggaaaatgttcagcactttgcgtttacccgcaaactgaccgagggtgacgtcagacagatcttttgccacgagagtaaaagtctgcgctttgctacccgcctgcgggatggaattggcgactgtaaccgggttgccctggaaatgaacggtttgactcatgattatctttcctgtttacatatagttaacgtcacacctagtttatgctaactgtcaataacacagcaaacgctattacagggtctccttacaacaactgtcaacgcagtttgtaattaaaagattaacccatatctggtgaatgaaacagtgatgaaccttctgccagatcaataaatcagaaaaatttaatgatatgacagaaggatagtgagttatgcggaaaaatcaggcaacgttacgcgtatgaccggcaagctgggccagcgcatcgttattttcgatggtgatgtatttacctttgactgccagcatgccgcttttctggaagcgacccagcagacggctgatggtttctaccgtcaggcccagatagttaccgatatcgccacgagtcatcgtcaggcggaattcacgaggggagaagccgcgttgggcaaaacgacgggacaggttgtagatgaatgcagccagacgttcctcggcatttttcttgctcaacagcaggatcatgtcctgatcgcctttgatttcaccgctcatcagacgcatcatctgctgacgcagattcggcattttaccggacaaatcgtccagcgtttcgaacgggatttcacataccatgctggtttccagcgcctgcgcgaagctcgggtgatggccgctgccgatggcgtcaaatcccaccaggtcgcctgctaaatggaaaccagtgatttgctcgtcgccttgctcagtgatggtataacttttaatcgtaccggagcggatggcataaaggcttttaagttcatcaccagccttaaacagcgtctggcctttctgaataggcttcttccgctcaatgatattatcaagctgatcaagctcatgttcgttgagtgtgaacgggatgcaaagctggctgatgctgcaatcctggcaatggatagcacaaccgccagactgaatgcgccgtataattcgcttttccgggatcataggtctgctcaagccgtaattgatatttgtcaattttaacatctttttagggagcaagtaagtctaagcaaaccttaacagcagagaattccgatattagatgtaaatatatgtctatctatttgaaaacccttaagttgttaagggtaactttacataaaagtgtgaacaagctggcacaaattgtttaatgtttacagcaaaagataaccttcatggcgcaataaccactcttttcgctgaactccgcctgcatatccggtcatggtgccgtttcggccaataacccgatggcaaggtacgacgatgctgatgggattgcttccgtttgccgcaccaacggcacgcgccgcgccaggacggcccaattgctcagccagttggccgtaatgcattacctgcccgcaggggatagtgcgtagtgttttccagacttcgcgctgaaatggcgtcccccccgtagcagtgggaagcgtatcaataatgctaagattaccggcaaaatattcacgaagcttgtcgcttaaaccgcctggattggtggcagaaatgcgctcatagccttctttgcgataatggatgtccagcagctgcaccatgcgttcgctgtactcttcccattcaaccgcccgcaggcgaaattgctcatcgcaaatcacccacagtggacccagtggcgtggcaattttttcttcaagtaatctcagcatccgttctctcttaagacaaacgtgggtaaatacccggacctatcggcagaccgacaagataccacgccagcacatcgcagccatactatgcagaaacaatgctgtcgatggctgcttttgcgtcagactgtgctttcgctgccatttccggaccgtatgcgatcccttcggcgaagacaaatttcacatcggtaatgccgataaagccgaggaacgtggacagatacggcgtcaccaggtccgttggtccatctttgtggatcccgccgcggctggtaataacgatggcttttttacccgttaccagaccttccggaccgttctcggtatagcggaaagtaacgcctgcgcgggcaaccaggtcaaaatagtttttcaactgagtcgagatgttgaagttatacatcggtgccgcaataacgataacgtcgtgggctttcagctcggcaatcaactcatcggaaagtgccagagcttcctgctgacgcggagtcagcggcgcatcgctcggacgcagagcgccaaccagttcgccatccagtaccggaatcggatttgcagccaggtcgcgaacggtgatttcatcagcggagtgcttttcgcgccattgttcaacaaaataatcggacaactgattagactgagagtaccctgccaggatgctggatttaagaactaataccttgctcatggtgtttccttatagatgtttgaatgggcgatgccccgttgcttgttgacactttattcacaatcctgccacagagatagcgcaataaatcgaagcctatgttcgaatttattgaacaacgcatagaaagccgcgatgtggtactctatatctatcatttaaaagaaaattaatcaggcagactactgcccactaacgttatgacagaacaacaaaaattgacctttacggccttgcagcagcggctggattcgctgatgctgcgtgacagactgcgtttttctcgccgtctgcacggcgtgaagaaggttaaaaatcctgatgcacaacaggccattttccaggagatggcgaaagagattgaccaggcggcagggaaagtcctgctgcgtgaagcggcacgaccggaaattacttatcctgacaatttaccggttagtcagaaaaaacaggacattctcgaagcgattcgtgatcaccaggtggtgatcgtcgccggggaaacgggttctggtaaaacgactcagttaccgaaaatctgtatggagctggggcgcgggattaaaggactgatcggccatacccagccgcgtcgtctggcggcaagaacagtggcgagccgtattgcggaagagctgaaaacggagccgggcggttgcatcggttacaaagtgcgtttcagcgatcacgtaagtgataacacgatggtcaagctgatgaccgacggtatcctgctggcggagatccagcaagaccgcctgctgatgcagtacgacactatcattattgacgaagcgcacgaacgcagcctgaatatcgattttttgctcggctatttgaaagagttgctgccgcggcgtcctgacctaaaaatcattatcacttccgcgactatcgacccggaacgctttagccgccactttaataatgcgccgattattgaagtctccggtcggacctatccggtggaagtgcgctatcgcccgattgttgaagaagccgatgacaccgagcgcgatcagttgcaggcgatttttgacgccgtagacgaactgagtcaggaaagccatggcgacattctgatctttatgagcggcgagcgggaaatccgcgataccgccgatgcgctgaacaagctgaacttacgccataccgaaatcttgccgctttatgcgcggcttagcaacagcgaacaaaatagggtattccagagccacagcggacggcgcattgtgctggcgaccaacgtcgcggaaacgagcctgaccgtaccggggattaaatacgttatcgaccccggtacagcgcgtatcagccgctacagctatcgcaccaaagtgcagcgtttgccgattgagccgatttcccaggcgtctgccaatcagcgtaaaggccgctgtggtcgtgtgtccgaagggatctgtattcgtctctattccgaagacgatttcctcagccgcccggagtttaccgatccggagattctgcgtaccaacctggccagcgttattttgcagatgaccgcgctggggctgggcgatatcgctgcgttcccgtttgtcgaagcaccggataaacgcaatatccaggatggcgtgcgtctgctcgaagagctgggcgcgatcaccactgatgaacaggccagcgcctataaactgacgccgctcggtcgccagctcagccagttgcctgtcgacccacgtctggcgcgtatggtgctggaagcgcaaaaacatggctgcgtgcgtgaggcgatgattatcacgtccgcgctctccattcaggatccgcgcgaacgtccgatggacaaacagcaggcaagcgacgaaaaacatcgtcgcttccacgacaaagagtctgactttctcgcgtttgtgaatctgtggaattatcttggcgagcagcaaaaggcgctttcttccaacgccttccgtcgcctgtgtcgtaccgattatctcaactatctgcgcgtgcgcgaatggcaggatatctacacccagttgcgtcaggtggtgaaagaacttggcattccggttaacagcgaaccggcggagtatcgcgaaattcacattgcgttgctgaccggtttactttcccatatcggcatgaaagatgccgataaacaagaatataccggcgcacgtaacgcgcgtttctccatcttccccggttctggtttattcaaaaaaccgcctaaatgggtaatggtggcggaactggtagaaaccagccgcctgtgggggcgcattgctgcgcgtatcgacccggaatgggtggagccagttgctcagcatttgattaaacgcacctacagcgaaccgcactgggaacgggcgcagggcgcggtgatggcaacggaaaaagtcactgtttatggtttgccgattgttgccgcgcgcaaggtcaactacagccagatcgatccggcgttatgtcgtgaactctttattcgccacgcgctggtggaaggtgactggcagacgcgtcacgcattcttccgtgaaaacctgaaactacgggcggaagtagaagagctggaacacaaaagtcgtcgccgcgatattctggttgatgacgaaacgttgtttgagttctacgaccagcgcatcagccacgatgtaatctccgctcgccacttcgacagctggtggaaaaaagtcagccgcgaaacgcctgatttgctcaactttgaaaaaagcatgttgatcaaagagggcgcagaaaaaatcagcaagctggattacccgaacttctggcatcagggcaatctcaagctgcgtttgagctatcagtttgagcccggcgcggatgctgacggtgtgaccgtacatattccgctgccgttacttaaccaggttgaggaaagcgggtttgaatggcagatccccggtctgcgccgcgaactggtgattgctctgattaaaagcttgccgaaaccggtacgccgtaattttgtacccgcgccaaactatgccgaagcgtttttaggccgcgtcaaaccgctggagttaccgttgctcgacagccttgagcgcgagttacggcggatgaccggcgttaccgttgaccgcgaagactggcactgggatcaggtgcccgatcacctgaaaattaccttccgcgtggtggatgacaaaaacaagaagctaaaagaagggcgcagcctacaagatctgaaagatgcgctgaaaggcaaagtgcaggaaacgctatctgcggtggcggatgacggtatcgagcagagcggcttacatatctggagttttggtcagctgccggaaagctacgaacagaagcgtggcaactacaaagtgaaggcgtggccggcgctggtggatgagcgcgacagtgtggcgatcaaactgtttgataacccgctggagcaaaagcaggcaatgtggaacggtcttcgccgtctactgctgctgaatattccaagcccaatcaaatatttacatgaaaagttaccgaacaaagccaagctgggactgtactttaacccgtatggcaaagtgctggagctgatcgacgactgtatctcctgcggtgtggataaattgatcgacgccaatggtggcccggtctggacggaagaaggctttgctgcgctgcatgaaaaagtgcgtgccgaactgaacgacacggtggtggatattgcgaagcaggtcgagcaaatccttacggcagtgttcaatatcaacaaacgtctgaaagggcgggtggatatgaccatggcgctggggctttctgacattaaagcgcagatgggcgggttggtatatcgcggttttgtcactggtaacggcttcaaacggctgggcgacacgctgcgatatttgcaggcgattgaaaaacggctggaaaaactggcggttgatccacatcgcgaccgtgcgcagatgctgaaagtcgaaaacgtccagcaggcgtggcagcaatggatcaacaaactgccgcccgcacgtcgtgaggatgaagacgtgaaagagatccgttggatgatagaagagttgcgcgttagttacttcgctcaacaacttggtacgccttatccgattagtgataagcgtattttgcaggcgatggagcagattagcggttaaccctgctatttgcctgataaagaaaaaacccggtaagcatttagcgccgggttttttattaattctaaaacggtaagggtaaaaattcaggaattcagaaaaatacaattctctgctgcaagatgaataatgtttatctacagcatttccttaaaagatatgtcaggcttgcggagtggcggttaaggacatacgatttcctcctttcagagtgctccgcttctcactattatctcacgcagtattcttaagggaacgataaggaggaaccatgaacattaccccgtttccgacgcttagcccggcaactatagatgccataaatgttatcggacagtggctggcgcaggatgatttctccggtgaggtgccgtatcaggccgattgcgtgatccttgcaggcaatgcggttatgccgactatcgatgcggcatgtaagattgcccgcgatcagcaaattcctttactgattagtggtggtatcggtcacagcacaacttttttgtatagcgccatcgcacagcatccgcactacaacactatccgcaccactggcagagcagaagcgaccatcctggcggatatcgctcatcagttctggcacattccgcatgaaaaaatctggattgaagaccagagtacaaactgcggtgaaaacgcacgctttagcatcgcgctattgaatcaggccgtagaacgagttcatacggctatcgttgttcaggaccccaccatgcagcggcgcacgatggcgacgttccgccgtatgactggggacaatcccgatgcaccacgctggttaagttatcccggattcgttcctcagttaggaaataacgcagacagtgtaatctttattaatcagttacaaggattatggccagttgagcgttatctcagtctactcactggcgagctgccgcgtttacgcgatgatagcgatggctacggtccccgcgggcgagattttatcgttcacgttgattttccggcagaagtcatccatgcatggcaaacgctgaaacatgatgcggtgctcatcgaggcgatggaaagtcgcagcttacgttaaaaattgcccgtttgtgaaccacttgtttgcaaacgggcatgactcctgacttttatttctgccttttattccttttacacttgtttttatgaagcccttcacagaattgtcctttcacgattccgtctctctgatgattgatgttaattaacaatgtattcaccgaaaacaaacatataaatcacaggagtcgcccatgagtgtacccgttcaacatcctatgtatatcgatggacagtttgttacctggcgtggagacgcatggattgatgtggtaaaccctgctacagaggctgtcatttcccgcatacccgatggtcaggccgaggatgcccgtaaggcaatcgatgcagcagaacgtgcacaaccagaatgggaagcgttgcctgctattgaacgcgccagttggttgcgcaaaatctccgccgggatccgcgaacgcgccagtgaaatcagtgcgctgattgttgaagaagggggcaagatccagcagctggctgaagtcgaagtggcttttactgccgactatatcgattacatggcggagtgggcacggcgttacgagggcgagattattcaaagcgatcgtccaggagaaaatattcttttgtttaaacgtgcgcttggtgtgactaccggcattctgccgtggaacttcccgttcttcctcattgcccgcaaaatggctcccgctcttttgaccggtaataccatcgtcattaaacctagtgaatttacgccaaacaatgcgattgcattcgccaaaatcgtcgatgaaataggccttccgcgcggcgtgtttaaccttgtactggggcgtggtgaaaccgttgggcaagaactggcgggtaacccaaaggtcgcaatggtcagtatgacaggcagcgtctctgcaggtgagaagatcatggcgactgcggcgaaaaacatcaccaaagtgtgtctggaattggggggtaaagcaccagctatcgtaatggacgatgccgatcttgaactggcagtcaaagccatcgttgatagtcgcgtcattaatagtgggcaagtgtgtaactgtgcagaacgtgtttatgtacagaaaggcatttatgatcagttcgtcaatcggctgggtgaagcgatgcaggcggttcaatttggtaaccccgctgaacgcaacgacattgcgatggggccgttgattaacgccgcggcgctggaaagggtcgagcaaaaagtggcgcgcgcagtagaagaaggggcgagagtggcgttcggtggcaaagcggtagaggggaaaggatattattatccgccgacattgctgctggatgttcgccaggaaatgagcattatgcatgaggaaacctttggcccggtgctgccagttgtcgcatttgacacgctggaagatgctatcagtatggctaatgacagtgattacggcctgaccagtagtatctatacccaaaatctgaacgtcgcgatgaaagccattaaagggctgaagtttggtgaaacttacatcaaccgtgaaaacttcgaagctatgcaaggcttccacgccggatggcgtaaatccggtattggcggcgcagatggtaaacatggcttgcatgaatatctgcagacccaggtggtttatttacagtcttaatgagtgaaagaggcggaggttttttcctccgcctgtgcgcgtcagagtttagcgaatttttcgagggtgcgaataagctgtgtgacgaagccatattcgttatcgtaccaggcgaccgttttcaccagttgtaaatcgcccacggcggtaatttccgtttgcgtggcatcaaacaccgaaccgaaatggctgccaatgatatcggaagagactatttcttcatcggtataaccaaatgactcgttattggtggttgcttgtttaagtgcgttattcacctcttcggcagtcacttttttccgagaatcgataccagttcagtgaccgaacctgttttcaccggcacgcgttgcgcatgacctttcagtttgccgctcagttccgggatcaccagaccaatggcttttgccgcccccgtagtgtggggaatgatattttctgccgctgcgcgtgaagcacgtaaatctttaccacgcgggccatccaccagtgactgggtgccagtataggcatgaatggtcgtcatcgtgccgacttctatcccgaaactgtcatgcaaggctttggccatcggcgcaagacagttagtggtgcatgacgccacggaaacaatggtgtcgttgccatccagagtgtcgtcattgacgttataaacgatagttttcatttcaccggcaggggcggaaatcaacaccttcttcgcaccagcatcaagatgcgcctgcgatttctcggcggaggtataaaagccagtacattcgacaatgatttctgcacctttcgctttccacggaatatttttagcctctttttcggcgtaaaccgcgatacttttcccatcaacgataagtgaatcttccgtaaaatcaacgctccaggggaatggtccgtagtttgaatcatgtttcagcaggtaggcgagaatttatggggaagtgagatcattaatagcgacaacgtctatgttgcttttgacttcaagtaatcgacccaacaccagtcgaccgatacgaccaaaaccgttaataccaactttactcatggttttctcctgtcaggaacgttcggatgaaaattgatcctttccaagcttagaccaggatggcgggatgggcaatctccattctcacagtgaaacgtaacgtactgaaaacgggtgaacaatatttaatgaaattttgagaaaagcccgttatgttaacggaaaattatgttaaagcaggaaatgttatggaaaataaatatagtaggttacaaatcagcattcactggctggtctttttactggttatcgcagcgtattgcgcaatggagtttcgtggtttcttcccacgtagcgatcggccactcatcaacatgattcatgtttcctgtggcatcagtattctcgtgctgatggtcgttcgtcttttgttaaggctgaaatacccaaccccgccgattatacctaagccaaaaccgatgatgacgggactggcgcatttgggacatttggtgatttatctcctgtttattgcgctgccagtgattggtttggtgatgatgtataaccggggcaacccgtggtttgcgtttggtttgacgatgccttacgctagtgaggccaatttcgaacgggtagatagcttaaagagctggcatgaaacgctggcgaatctgggatattttgttatcgggttgcacgctgcggctgcactggcacaccactatttctggaaggacaacacacttctacgcatgatgccgcgtaaacgttcctgaaggatatttaaagaaaacgcctgtactaaaaccgacccgtggtacaggcgaagaatacgggtctacatcggaagcgcctattatatttatttgtatgataaataaaaccataatccttgcccatacgtccatctggcttatttttaatcaattcacccgatctttgatctcatcaacggtatcaaaataaaccagcgtataacgttcaaatcgaacataagattcgataaaccatggaggttatatgaaaaaactggcacttattttgtttatgggaacgcttgtttccttttatgccgatgccgggcgcaaaccctgttctggtagcaaaggggggatcagtcactgtacggcaggcggcaaatttgtctgtaatgatggttctattagtgcaagcaaaaaaacatgcactaactgaagtgtaaaaggggtgccatgagaaaatgaatctgctagtcaaatgcgcggggaaaatccccgcgcttgcccttacctggacgtgcaggccatgagcgcagcaacctccttatcaccgtcccggaaccgcagttcgtagagcgtttgtcgggtcaggagtgtgaatgtcagaatcgtaatgcagataatgagcagacacaccaccagagggttgtgcttcatagcctttctccttgccggatggcgggtaagaggctaagatctgaattgctaggttcattcgttggcctcggttgatagaaatatcggtcggggccttcgtctttctgattcccggttagcctgaaaacagaaagtctcaggcacccgcaggcatcctatgaggtttccttagggacgaaaataatcacttcacgaaattgcgtgctgttttccagaatttttcgtcattcgggttagccagtttagccattcgttactctcttcattccaatagcattaattttctatgcaataattgttgtaaaaatgtgacgcaaagaggtttttggtcataagtaattaccgtcaagtgccgatgactttctatcaggagtaaacctggacgagagacaacggtaatgaatacaactcccagtcagcgattaggttttttgcatcacatcaggttggttccgttatttgcctgcattctaggcggtatcttagttctattcgcattaagtagtgccctggctggctatttcctctggcaggccgatcgcgatcagcgtgatgttactgcggagattgagattcggaccgggttagcgaacagtagtgattttttgcgtagtgcccggatcaatatgattcaggccggggctgcgagtcgtattgcggaaatggaagcaatgaagcgaaatattgcgcaagccgaaagcgagattaaacagagccagcaaggttatcgtgcttatcagaatcgaccggtgaaaacacctgctgatgaagccctcgacactgaattaaatcaacgctttcaggcttatatcacgggtatgcaacctatgttgaaatatgccaaaaatggcatgtttgaagcgattatcaatcatgaaagtgagcagatccgaccgctggataatgcttataccgatattttgaacaaagccgttaagatacgtagcaccagagccaaccaactggcggaactggcccatcagcgcacccgcctgggtgggatgttcatgattggcgcgtttgtgcttgccctggtcatgacgctgataacatttatggtgctacgtcggatcgtcattcgtccactgcaacatgccgcacaacggattgaaaaaatcgccagtggcgatctgacgatgaatgatgaaccggcgggtcgtaatgaaatcggtcgcttaagtcgtcatttacagcaaatgcagcatagtctggggatgacagtagggactgttcgacagggcgcggaagagatttatcgtggcaccagcgaaattagtgctggcaatgcggacctgagttctcgcaccgaagaacaagcggcggctatcgaacaaactgccgccagcatggagcaactcactgcgacggtgaaacagaatgcggataacgcgcatcatgccagcaaactggcgcaagaggcttctattaaagccagcgatggcgggcagacggtttccggtgtagtaaaaacgatgggcgctatctccacgagtagcaagaaaatttctgagatcaccgccgtcatcaacagtattgctttccagacgaatattctggcactgaatgctgccgttgaagccgcgcgagcgggtgagcaagggcgtggatttgccgttgtcgccagcgaagtacggacactcgcaagtcgcagcgctcaggcggcgaaagagattgaaggcttgatcagtgaaagtgtcaggttaattgacctggggagcgatgaggtggcaacggccgggaaaaccatgagcactattgttgatgccgtcgcgagtgtcacacatatcatgcaggaaatcgccgccgccagcgatgaacaaagtagaggcataacgcaggttagccaggcgatttctgaaatggataaggtgacgcaacagaatgcttctctggtagaagaggccagtgcggcggcggtgtcccttgaagaacaggcggcacgattaactgaggcggtggatgtattccgtctgcacaaacattctgtgagcgcagaacctcgcggagcgggtgaaccagttagtttcgctacggtgtgaaaatgttcaaggagggatcgacagatcccttcacctttcagaacggcatactttttcgaatagcgttaatcatcaactggcaaccagaagagaacgtcgcatctacgcgggtcagtattccaatcggttcgcctgcaccatgtcccggaacaggcagggccaccagcgtggcatgacgcaggtcgtcttttacagcgccagaagggacaaaccacacgtaatcgtattcaaccgtaagttgacgagataggctagcagacagcgtttcgatacaaccgctaggaattttacagccctggctctgcactaatgcatcactatgctggcgtggcgcagtgccttctggacttacaacgaccggccattccagcacccggcttagcgttacgttctcctgaagtagcgggtgattagggcggacaaccagcttcaagctttcaagaaacagcagttcgtaattaagcccggtcatcagttcaggatcactcatccgaccaatgccgatatcgatttccccggtttttaaacccgccagaatcatagggttactcattgtcgcaacttgcaaggtcgtctctttttgttgctgatgaaactgacctataacgctaggtaatatccccagtgccgcagtaggtagtgcaccaaccctgacgacatcattattaagaccttctttacgatgaaggctccgtccggcagtgttgatggcgtcaagaactctgactgcatgcgttaaaaattgttcgccgggtaaggtaagttgcgccccctgacgaccacgctcaaacaagcgagcgccagtcagctgctccagttcattcaatgtcttagagagcgcaggttgactcaaattaagggtttcagccgcgcgccccaaagttccttgttgtgcgacagctacgaatgtatgaaggtggcgcaaacggatgcgctgactaaacagactatttttttccataagcgatgttaaaaacgaagcggtgtcgctgacaagtgaagttgtttgattatgataacttgattgcaaaatattattaacaattaaagcaattatgttacagcaaaatggataatattgatgttttcgcggcgagatcacagtttgtaaattcttcccgcaagagtgaatgcggttacctacactccagattactgaccactggaggcagacactatggcgaacagcatcacggcggatgagattcgggaacagtttagccaggcaatgagtgccatgtaccagcaagaagttccgcaatatggcacgctgctggaactggtagctgatgtgaatctggctgtgctggaaaacaatcctcaactgcacgaaaaaatggtaaatgcagacgagctggcgcgactgaatgttgaacgtcatggggcgattcgcgttgggactgcacaagagcttgctactcttcggcggatgtttgccattatggggatgtacccggtgagctattacgatctcagccaggcaggggtgccggtacatagcacagcatttcggcccattgatgatgcttctctggcgcgtaatcccttccgcgtttttacctccttactccgccttgagcttatcgagaacgaaattttgcgccagaaagcggcggagattctgcgtcagcgcgatatcttcaccccacgttgtcgacaactgttagaggaatatgagcagcagggcggctttaacgaaacacaggcacaggagtttgtgcaggaagccctggaaacgtttcgctggcaccagagtgcaacggtagatgaagaaacctatcgcgcattgcacaacgaacatcggttgattgctgatgtggtctgttttcctggatgccatatcaaccacctgacgccacgtacgctggatattgaccgggtgcagagcatgatgcctgaatgcggaattgaacccaaaattctcatcgaggggccgccgcgccgcgaggtaccgattttactacgccagaccagctttaaagcactggaagagacggtgttgtttgcggggcagaaacagggcacgcataccgcgcgctttggtgaaattgagcagcgtggcgtggcattaacgccgaaagggcgacaactgtatgatgatcttctgcgtaacgctggaaccgggcaggataatctcactcaccaaatgcatttacaggaaaccttccgcacttttcctgacagtgagtttttaatgcgtcagcaagggttggcatggttccggtaccgtctgacgcctagcggtgaggcgcatcgtcaggcgattcatcctggagacgatccacagcccttaattgaacgtggttgggtagtggcgcaacccatcacctatgaagatttcttgcccgttagcgcggcggggatcttccagagtaatctgggtaatgaaacgcagacacgcagtcacggtaatgccagtcgcgaagcatttgagcaggcgttgggttgtccggttttggatgagttccagctttaccaggaagcggaagaacgcagtaaacgtcgctgtggtttgctttaaaatctgaccatccgcctttgcaaaaatttgcctgattttacaaacgaatcaggctcatcccatcgacataaaaaaaatgccgatttatgcatattctctcagttcaacaattggattattaataaatattgtctagagtgagcggtcataaataagcactttcttgccgctgaaaacgaccagcgcgggaccattcacaacaccagaaggactcactttcaggtatggatcgtagacgatttattaaaggttcaatggctatggccgccgtgtgcggtaccagcggcattgcttctcttttttctcaggcggcattcgcggcagattctgatattgccgacgggcaaacccagcgttttgacttctccattctacagagtatggcgcacgacttagcgcaaacagcgtggcgtggtgcgcctcgtccgttacctgacacgctggcgacaatgacgccgcaggcttataacagtattcaatacgacgccgaaaaaagcctctggcataacgttgagaaccgtcaactggacgctcagttcttccatatgggaatgggattccgtcgccgcgttcgtatgttttctgtagatccagcaacacatctggcgcgtgaaattcactttcgcccggagttgttcaaatacaacgatgcaggtgttgatacaaaacaattagaagggcaaagcgatctcggctttgccggttttcgcgtgtttaaagcccccgaactggcgcgccgtgatgtagtaagttttctcggcgcgagttatttccgcgccgttgatgatacatatcaatacggtttgagcgcccgcggcctggcgatcgacacttacaccgacagtaaagaagagttccccgactttaccgccttctggtttgatacggtaaaaccgggggcaactacctttaccgtttatgcgttgctcgatagcgccagcattactggtgcctataagttcactatccattgtgagaaaagtcaggtgattatggatgtggaaaatcacctgtatgcgcgcaaagacattaaacagctgggcattgcgccgatgaccagtatgttcagctgcggtactaatgaacgtcggatgtgcgatacaattcatccgcaaattcatgactctgatcgtctgtccatgtggcggggcaacggcgagtggatttgccgtccgctgaataatccgcaaaaattgcagttcaatgcttacaccgacaacaacccgaaagggtttggtttattgcaactggatcgtgacttctcccattatcaggacattatgggctggtataacaaacgcccaagtctgtgggtggaaccgcgtaacaagtggggtaagggcaccatcggcctgatggaaatcccaacaacgggcgaaacgctggataacattgtctgcttctggcagccagaaaaagctgtaaaagcaggtgatgagtttgcattccagtatcgtctgtactggagtgcgcaaccgcctgttcattgcccattagcgcgcgttatggcgacgcgtaccggcatgggcggtttcagcgaaggttgggcgccaggtgaacactatcccgaaaaatgggcgcgtcgttttgccgtcgatttcgttggtggtgatctgaaagctgccgcgccaaaaggcattgagccggtgattacgctttccagtggggaagcgaagcaaatcgaaattctctatattgaacccatcgatggttatcgtattcagtttgactggtatccgactagcgactccactgatccggtcgatatgcggatgtatctacgttgtcagggggacgctatcagtgaaacatggctgtatcagtatttcccgccagcgccggataaacgtcagtatgttgacgaccgcgtgatgagttaatcgttttttcttcggcaccttcttcgggaggtgccgtctggttaaacacgatcccgctcgcatttttccctaagttaaatgagtaatctgatggtgtgtatttcagatacaccttgtcagccactaacagggagtgcgtatgtttccagaataccgagatttaatatcccgtctgaaaaacgaaaatcctcgctttatgtccttgttcgataaacacaataaacttgatcatgaaattgccagaaaggaaggttccgacggtcgagggtacaatgcggaagtggtccgcatgaaaaaacaaaagctacagttaaaagatgagatgctcaaaatcctgcagcaggagagcgtcaaagaggtgtaaactttcctaagccgccagccaggcggcttttttaacaactgcatggattgactggagataagatgactgaaacgataaaagtaagcgaaagtcttgaattacatgctgttgcagaaaatcacgtcaaacctctttatcagttaatctgtaaaaataaaacctggttacagcagagcctaaactggccgcagtttgttcaaagtgaagaggacacgcgaaaaacggtgcagggtaatgtgatgttgcatcaacgcggctatgccaaaatgttcatgattttcaaagaagatgaacttatcggcgttatcagctttaatcgtattgaaccactgaataaaaccgctgaaatgggctactggctggacgaatctcatcaggggcaggggatcatttctcaggcgctgcaggcattgattcatcattacgcccagtctggtgaacttagacgcttcgtgatcaaatgtcgggtggacaatccgcaaagcaaccaggtcgctttgcgcaatggttttatccttgaaggttgcctgaaacaggctgagttcctgaatgatgcctatgatgatgtgaacttatacgcgcgtattatcgatagtcaataatcacaataaccctgccagcggcgttcgcgtaatgcgctcctcgccgttaatgacttttggaccacggacatgaaccgtgtcgccatcaaaggcttcaacgacggcgtggtcggttaactccacatggttttcaattatcaccgcacctgtaatacggctctcaccttgtatgacaacgtgctcgtcgagcagaatcggtccgccacgtaccacggcatttccgccaaccaagacatgatgttttaacacacaattaccttccacaatggcatattccgccacctggctactgtaatgaatcgtcggaatggcatcttcttctatgccagctttcacctgcgcgtgaccgtagactttagcgcaatcgcatagccagacattgttctcttcattaccttcaatactggcaaaatcaaaaacttcggcgcgatgttcaataaaagcataccggacgacggcatcgccataaatttgtgcctggtggacaatacggctggcgctaacccttgcgcgatcataaatttggagcaggagttgatggtcgggcgttaagccttgtgcggcgacgatcatagaatgttgatcaattaaggcgtgaccaaatattctacattgcccgtaaactaaactgtcatgaatggtgacgctgtcacttatatatgcaccctggctgatttcactattatcgatccagacgttatccgttgcgtaaacctctccccacagcacgctggtgccggtgatacgcgtattaccggaaatcaccgctccgccgaacgcaatagcattctggtcgtaaatccagcaatttccttcttgtgctaacaccgtttcgcgatcgatccagccgccagcggttcctgctatcacatcgttaaaatcgctaatggcgataatctgccgtaataacacattttttttagtgccatcttcctgataactaaaggctcgctgttcttcacttagacgatatttgcgcatagcgttttcccacaggtgacttactataaccgtagcaaattctgcggctctggctatgctcgagaaaattccataaaatgcatttcaaatatactttataaattaaacaaaatgagtaagaagatgcagagcgataaagtgctcaatttgccggcaggctactttggtattgtgttggggacgatagggatgggatttgcctggcgctatgccagccaggtttggcaggtcagtcactggttaggggatgggctggtgattctggcgatgatcatctggggattattgactagcgcatttattgcccgactcatacgctttccgcatagcgtgctggcggaagttcgccatccagtgctgagcagttttgtgagtttgtttccggcaacgacgatgctggtggcgattggttttgttccgtggtttcgcccactggcggtgtgcctgttcagttttggtgtcgtggttcagttggcttatgccgcctggcaaactgcgggattatggcgcggatctcaccctgaagaagctaccacgcctggactgtatctgccgacagttgccaacaactttatcagcgcaatggcctgtggtgcgttgggctacaccgacgccggtctggtgtttttaggcgcaggcgttttcagttggctaagccttgaaccggtgatcttgcagcgtctgcgcagtagcggagaattacccacggcactgcggacaagtctcggcattcagctcgctcctgcgctggtggcttgtagtgcctggctgagcgtcaacggcggcgagggtgacacgctggcgaaaatgcttttcggttatggactgctgcaactgctgtttatgctacgtctgatgccatggtatctctcccagccatttaatgctagtttctggagtttcagcttcggcgtatctgcactggcaaccaccggtttgcatctggggagtggcagcgataatggatttttccatacgctggcggtgccgctgtttatctttaccaattttattattgcaatactgctcatccgtacttttgcgcttctgatgcagggaaaattgttagtcagaaccgagcgcgccgttttaatgaaagcagaggacaaagaatgatcattcgtgacgaaaactattttactgataaatatgaattaacccgcacacactctgaagtactggaagcggtgaaagtggttaaaccgggtaaaacgctggatctgggctgtggcaatggtcgtaacagtctttacctggcagccaatggttatgatgttgacgcatgggataaaaatgccatgagtatcgccaacgtcgagcgcattaaatccattgaaaatctggataatttacacacccgagtcgttgatctgaataacctcacatttgatagacagtacgattttattcttagcactgtggtgctgatgttccttgaggctaaaaccatccccgggttgattgccaatatgcaacgttgcactaaacctggtggttacaacctgattgtggcggcgatggataccgctgattatccatgtaccgtcggcttcccgtttgccttcaaagagggagaattacgtcgatattacgaaggctgggagagggtgaaatacaatgaagacgtcggcgagctgcaccgcaccgacgccaacggtaatcgtattaaactgcgtttcgccacgatgctggcacgtaaaaaatgacccggtaagcacaaaacgcgtgaaaattccccacgctgagatgatttactgttcttcttttcggtaagcatattttttatcgaagggatgtgaaattaatcacagtagtcgaagtttttagcagcttaacttactgaaatttaagtactgatgattgacttagcccctttttcggcattgactatgtcgtctgaaaaggggctgaaaaatttattttcaccaacactttttttgccacaacacgaagcggcgctttttgctataacttagaaagtaatataatcatctcaggaaactattcatgcgtaccacaagttttgcgaaagttgcagctttatgcggcttattggctctgtctggttgtgcatctaaaatcacccagccagataaatattctggttttttaaacaattactctgatttaaaagaaacaaccagcgctacaggtaaacctgttttacgttgggtagacccgagttttgatcaaagcaaatatgacagcatcgtctggaacccaatcacttattatccggtaccgaaaccgagcacccaggtagggcagaaagttctggataaaattttgaactataccaacaccgaaatgaaagaagcgatagcgcagcgtaaaccactggttaccaccgctgggccgcgtagtctgattttccgtggggccattaccggtgtagataccagcaaagaagggctgcaattctatgaagtggttcctgttgcattagtggttgcggggacgcaaatggctacaggccaccgtaccatggatactcgcctctattttgaaggtgagctgattgatgcagcgactaataaaccggttatcaaagtcgttcgtcagggcgaaggtaaagacctgaataacgaaagtacgccaatggctttcgaaaatattaaacaagttattgatgacatggcgaccgatgccaccatgtttgacgttaacaaaaagtaattccagacgcgccatcgttagatggcgctttttatccggtgcgccgtaaaaccccatccttcagggcggggatataaggcgcggttttccacctgaccaggtgtttgctgttgttcaatgtattggcggatgacggatattggcgcacctccgcagctactggcaaaatagccaggactccacaaaacgcctttgtagtaatacctgaatgcaatatctggtcgatctcgtcgcagtcacctacccgatacgcctttgaggctgtttaccagactggatatcgccagtttgggaggatagttaattaacaaatggacgtgatctggttcgccatccatttcaaccagttcagcttcaaaatcagcacatacatttgaaaagtaagtgcgtagtttttctgtcgcgtcatggtcaaaaatctggcgtcggtatctggtgacaaagagcaggtgaacatgcatcaggaaaacacaatgccttccacgccggatatcggtttcttttttcacagaccaaagtatcatttgacctgtgaaacgattacaggcatttaaattccagttaagacccggtggtcaacaggagtgtgaaatgaggcgcttcgcaggcgcatgtcgtttcgttttcaatcgtgctctggcacgtcagaatgagaatcatgaggccggtaataaatacatcccttacgggaaaatggcttcctggctggttgagtggaaaaatgccactgaaacgcaatggcttaaagattctcccagtcagccattgcaacagagtctgaaagaccttgagcgggcttacaaaaacttcttccggaagcgggctgcttttccccgattcaaaaagcggggacagaatgatgcattccgctacccgcagggcgttaagctcgatcaggaaaacagccgtatttttctgccgaaactgggctggatgcgctaccggaacagccgtcaggtcacgggtgttgtgaaaaatgtcactgtcagccagtcctgcggtaagtggtacatcagtattcagacagaaagtgaagtaagtactccggttcaccctagtgcaagtatggtcgggctggatgctggcgtggctaaactcgccacgctgagtgatggcacagtctttgagcctgtaaacagttttcagaaaaaccagaagaagctggcgagacttcagcgacagttaagccgcaaggtcaaattcagcaacaactggcaaaagcagaaacgcaaaatacagcgactgcattcctgtatcgcaaatatccgcagggactaccttcacaaagtcacaacggccgtcagcaaaaaccacgcaatgatagtcattgaggatttgaaggtcagcaacatgagtaagagtgcagcgggtacggtcagccagccggggcgcaatgtccgggcaaaaagtggtttaaaccgtagcatactggatcagggctggtatgaaatgcgccgccagcttgcgtataagcagctctggcgtggcggtcaggtgcttgctgttccgccagcgtatacaagccagcgttgcgcgtactgtggtcatacagcgaaagagaaccgcctgagtcaaagtaaattcagatgccaggtatgtggatatacagcgaacgccgatgtaaatggcgctcgcaacattttagcggcggggcacgccgttcttgcctgtggagagatggtgcagagtggccgcccgttgaagcaggaacccaccgaaatgattcaggcgacagcctgaacgtagcagggatccacgtccttcagggcgtggaggatgtcaatatcggtttctgtcagcgattaaattcaacaccacgtaacaaacgcctccggcaattaatccccaaaacgcagaaccaatcccgaccagcgtcaatccacttgccgttaccagaaatgccaccaccgccgcgtctcgctcacgctcattatgcagcgcctgatacaaactgccgccgatggtacttaacagcgccagacctgccagcatctggatccaacttacgggcagggcagccatcatcccggtaatggcactaccaaacagacctgcgagcaaatagaaaatgcctgcaacggcagcggccagccaacgttgatctttatccggatgcgcttccgggctttggcaaatagccgcggtgattgccgcaataccgacggaataaacgccgaaaggggaaaaaaccagtgccagcaatccagtaaatacaattaatgggctaacaggagcgctatatccagctgctttcattgctgcgatacccggtgcgttttggcttgccatcgtcaccagaaaaagggggagtgcaacgctcaggctgtgagcaaagctaaaatcaggggtaatataagtggggagaacgggtttaaagacaacatcagttgtgacaacgtcaccttgcgcgatgacgatcacgatcccaataatcatcgcggcaattaccgcatagcgcggcgcaacggccttggttgccagccataccagcaacatacttccacacaacgtaaattgaccgtccagactggcaaacgcctgtaaaccaaagcgtaataaaatcccggcaagcattgccgccgcaaggctgtgcggaataatgcgcatcagacgagcaaagagtcccgttatgccgcagaggactattagcgcgttggtgacaataaaaacgccgatggcttcgttaagtgttagtccctgcaatccggtgaccaacaaagccgcgccaggcgtactccatgcggtgagaacaggtacgcgataccataatgtcagagtcagcgtactgacgcccattgccagccccagcgccgtcatccagccagagatttgtgcagtggtggctccggcgacaatcgctgcttgccagattattgccgcactactggcgtagccaattaataccgccagaaaccccgccagtagcgtgggtggaggaatagaaaacagacgcatagtcacctcgtgcgttatagcgtacaggcaccgtagcatttgtccgttataacgcacaagtgataaacttccgttttgccggaggagtcgcatggaaaatctcgctcgctttttatccaccacacttaaacaactacgccagcagcgcggctggagtcttagccgactggcagaagcgacgggcgtttctaaagcaatgttagggcagattgagcgtaatgagtccagtccgacggtcgcgacattatggaaaattgccaccgggttgaacgtaccatttagtacatttatttctccgccgcagtccgctacgcctagtgtttatgatccacaacagtaggcgatggtgatcactagcctgtttccttatgatccacaactctgctttgaacacttcagcattcagatggcatctggtgcaataagcgaaagcacgccccatgagaagggggtaatcgaacatgtcgtcgtcattgatggacaacttgatctgtgcgttgatggggaatggcagacccttaattgtggggaaggcgttcgatttgctgcagacgtcacgcatatctatcgtaatggtggggagcaaaccgtacattttcattccctcatccattacccgcgcagttaagcgggaaaactatttcgcaacgtcgcgcttgtggctaaaatagccgccatttttcagctactggataagaatgtgaccgtatcttctcatcgacttgaactgttaagcccggcacgcgatgccgccattgcccgcgaagctattttgcacggtgccgatgctgtttatatcggcggccctggttttggtgcccgtcataatgccagtaatagcttgaaagatattgccgagctggtgccgtttgcccatcgttatggtgcaaaaattttcgtcacgcttaacaccattttgcatgatgatgagctggaacccgcgcaacggctgattactgacctctaccagaccggtgtcgatgcgctgattgttcaggatatggggattctggaacttgatattccgccgattgaactgcacgccagtacgcagtgcgacattcgtacagttgaaaaagcgaagttcctctctgatgttggcttcacgcagattgtgctggcgcgagagctgaatcttgatcagatccgcgcgattcaccaggctacggacgcgaccattgaattctttattcatggggcactgtgcgtggcctatagcggtcagtgctacatttctcatgcgcaaacagggcgtagcgccaaccgtggcgattgcagccaggcgtgccgtttgccatacacattgaaagacgatcaggggcgggtggtttcctatgaaaaacatctgctgagcatgaaagataacgatcagactgccaacctcggcgcgctgattgatgctggtgtacgctccttcaagattgaagggcgttacaaagatatgagctacgtgaagaatatcaccgcccattatcgccagatgcttgatgccattattgaagaacgtggcgatctggcgcgcgctagtagtggtcgtactgaacatttctttgttccaagcacggaaaagactttccaccgtggtagcacagattattttgtgaatgcccgtaaaggcgatattggcgcgttcgatagcccgaaatttatcggcctgccggtaggcgaagtagtgaaagtggcgaaagatcatctcgatgttgccgttaccgagccactggcaaatggcgatggcctgaacgtgttgattaaacgtgaagtcgtcggttttcgtgccaatacggtcgagaaaaccggagaaaatcagtaccgcgtctggcccaatgaaatgccagcagatttgcacaaaattcgtccacatcacccactaaaccgtaatcttgatcataactggcagcaggcactgacaaaaacctccagcgaacgtcgggtggcggtagacattgaactgggcggctggcaggaacaactgattctgaccctcaccagtgaagagggtgtcagcatcacgcatacgctggacgggcagttcgacgaagccaataacgccgaaaaagcaatgaacaatctgaaggatggtctggcaaaactggggcaaaccctctattacgcccgcgatgtgcaaattaatttgccgggggcgctgtttgtaccaaacagtctgttaaaccagttccgccgtgaagctgctgacatgctggatgctgcgcgtcttgccagttaccagcgcggcagccgtaaaccggttgctgatcctgcgccggtttatccgcaaacgcatctgagtttcctcgcgaacgtatacaaccagaaagcgcgtgaattttatcatcgctatggtgtgcagctgattgacgcggcgtatgaagcacatgaagagaagggcgaagtcccggtgatgatcaccaagcattgtctgcgctttgcctttaatctgtgcccgaaacaggcgaaaggcaatatcaaaagctggaaggcgacgccaatgcaactggttaacggcgatgaagtattaacgctaaagtttgattgccgcccatgcgagatgcacgtcattggcaaaatcaaaaatcacatactgaaaatgccgttaccgggaagcgtagtggcatccgtaagtccggatgagctgctgaaaacattgccgaagcgaaaagggtaaaacgccagttttctggttactcacaacttattgaatctgcatgatattgcctgccgggtaaggcgttacgccgcatccggcatcaaatgactcaacgttgtcccgcttctggtttgcggcttttttgccagtaaaaatgctcgcgcaaaccttccgcgctctcttccgccacagcacgcaattcatcgctgtccgcttcatgacgcagctgatgatccacattctttacccacacaaattcatgtcctttgtgccctgccatgagttgtccactaaacagagcacacgttaataagacaacgcttaacgccttcgtaaacatcctgccacctttttcttaccttttgccgctatgatgccgatcgtttcttgaggttattattcagttttgcaaattagcgcaaagaaattctggaatcttccttcctgattttgcattgcattctgccgttgcggcgatttagtgctattttcgagcaaattacacacggaggtaaacactaatgtttactttgttgatatactcagcggcagggaggcgatgtgaaacaaagcgagttcagacgttggctcgaatctcagggcgtcgatgtagcgaatggcagcaaccatttgaaactcaggtttcatgggaggcgcagtgtcatgccgcgtcacccctgcgatgagattaaagaaccattgcgtaaagcaatcctgaaacaactcggtttgagttaatcgccaattaaaaaggttaatgacatgcgagagacagtcgaaattatgcgttatcccgtcactcttacacccgcgccggaaggcggttatatggtttcttttgtggatatccctgaagcgttgacccagggcgaaactgtcgctgaagcgatggaagcggcaaaagatgctttactgaccgcatttgatttttattttgaagataacgagcttatccctttacctagcccattaaatagtcacgatcactttattgaagtacctttgagcgtcgcctctaaggtattgctgttaaatgcttttttacagagtgaaatcactcagcaagagttagccaggcgaattggcaaacctaaacaggagattactcgcctatttaacttgcatcatgcgacaaaaatcgacgccgtccagctcgcggcaaaggcgcttggcaaagagttaagcctggtgatggtttaattacagttaacgaaaagttgtcatttttaacaactgatatagactgccgaatcatctgcacataattacgattcgataatgaaaaaataccagcagcttgcagaacaattacgcgagcagattgcgagcggtatctggcaacccggcgatcgtttgcctagcttgcgtgaccaggtggcgcttagtggcatgagctttatgactgtcagccatgcctatcagttgctcgaaagtcagggatatattatcgcacgaccgcagagcggttattacgttgcgccacaggcaataaaaatgccgaaagcgccagtcattccagtcactcgagatgaagcagtcgatatcaacacttatatttttgatatgttgcaggccagtcgcgatccgagcgtcgttccgtttgccagcgcctttcccgacccgcgacttttccccctccaacaactaaaccgcagcctggcgcaggtaagcaaaaccgccacagcgatgagcgtgattgaaaacttaccgccaggaaacgcagaactgcgtcaggctattgctcgtcgctatgccttacagggcatcaccatttctcctgatgaaattgtcattactgccggggcgttagaggcattaaacctcagtttgcaagcggtaactgaaccgggcgattgggtgatagtagagaatccttgtttctacggtgcgttgcaggcgctggagcggctacggctgaaggcgttaagcgtggcgacggatgttaaagaagggatagatcttcaggcgctggaactggcgttgcaggagtatccggtgaaagcgtgctggctgatgactaatagccagaatccactcggatttaccttaacgccgcaaaaaaaaagcacaactggtggcgttgctcaatcagtacaacgtaacgctgattgaagatgacgtttacagcgaactttattttggacgggaaaaaccgctgcctgcgaaagcgtgggatcgccacgatggcgttttgcattgctctagctttagcaaatgtctggtgcctggttttcgtattggttgggtcgccgccggaaaacatgcacgtaaaattcaacgcttgcagttgatgagtacgctttccaccagcagtccgatgcaacttgcgctggtggattacctttccacgcgccgatacgacgcccatcttcgtcgcctgcgtcgccagcttgcggaacgtaaacaacgtgcctggcaggcactgctgcgttatctgcctgcggaagtgaaaattcatcataatgacagtggttactttctctggttggagctccccgagccgttagatgccggcgaattaagcctggcggcactgacgcatcatatcagtattgcgccgggtaaaatgttttctaccggtgaaaactggagtcgttttttccgttttaataccgcgtggcagtggggagagcgtgaagaacaggcggtaaaacaattaggcaaacttattcaagaacggctgtaatagcgtttaatttaattcctcttagattgggtaatatgaatttcgaatagcagtcatatttcctaactccttgactatactccagaagataaccttacagacggcataatgcgcggtagctcacaacctgaataaattttctcaggggcgaaggtgtgcctgcaagccgccgtctatggttaaacaaggagatatttttacggcacggcggctgaacaattaattacgacaggagtaagaccttatgagcaagacatttgcccgcagcagcctgtgtgcgctcagcatgacaataatgaccgctcacgccgccgaaccgcctaccaatttagataaaccggaagggcgactggatattatcgcctggccgggatacatcgaacgcggacaaactgataaacaatacgactgggtaacgcagttcgaaaaagagacaggctgcgcggtgaatgtgaaaaccgccgcgacttccgatgaaatggtcagtctgatgaccaaagggggttacgatctggttacggcatccggcgatgccagcctgcgtttgattatgggtaaacgcgtgcagccgattaataccgcattgattcccaactggaaaacgctcgatccgcgcgtggttaaaggcgactggtttaatgttggcggcaaagtttacggcacaccttaccaatgggggccgaacctgctgatgtacaacactaaaaccttcccgacgccgccggatagctggcaagtggtttttgttgagcaaaatctgccggacggcaagagcaataaaggccgcgttcaggcttatgatggccctatctatattgcggacgctgcgttgttcgttaaagccactcagccgcagttgggcatcagcgatccgtatcaactcaccgaagaacagtaccaggcggtgctgaaagtgctgcgcgctcaacacagtttgatccatcgctactggcatgacactaccgtgcaaatgagcgatttcaaaaacgagggtgtggttgcttccagtgcctggccctatcaggccaacgccctgaaagccgaaggccagcctgttgctaccgttttcccgaaggagggtgttaccggttgggctgataccaccatgctgcatagcgaagcgaaacatccggtttgcgcctacaaatggatgaactggagtttaacgccaaaagtgcagggcgatgtggcggcctggtttggcagcttaccggtagtgccggaagggtgtaaagccagtccgttattaggcgaaaaaggttgtgaaaccaacggttttaactatttcgacaaaatcgccttctggaaaacgcctatagcagaagggggcaagtttgttccctacagtcgctggacgcaggattacattgccattatgggcggtcgctaacttcgctggggtgctttatgacgtacgcagtggagtttgacaacgtcagccggttgtacggtgacgtgcgcgcagtagatggcgtcagtattgcgataaaagatggtgagttcttctctatgctggggccgtccggctccggcaaaaccacctgcctgcgcctgattgctggcttcgaacagctttccggcggggctatctctatctttggtaaacccgccagcaatctgccaccgtgggagcgggacgtgaatactgtctttcaggactacgcgctatttccgcatatgagcattcttgacaatgtcgcctatgggctgatggtcaaaggcgtgaataaaaagcagcggcacgcaatggcgcaagaggcgctggagaaagtggcgttggggtttgtacatcaacgtaaaccgagtcaactttctggtggtcagcgccagcgggttgctatcgccagagcattggtgaatgaaccgcgcgtattgctgttggatgaaccgctcggcgcactggatctcaaattgcgtgagcagatgcagctggaactgaaaaaactgcaacagtctctcggtatcacttttatcttcgttacccacgatcagggcgaagcgttaagcatgtccgatcgtgtggcggttttcaataatggacgcattgagcaggtcgattccccgcgcgatctctatatgcgcccgcgcacgccgtttgttgccgggttcgttggtacaagcaatgtttttgatggactgatggcagagaaactttgtggcatgacgggaagcttcgccctgcgaccggaacatatccgcctcaacacccctggtgaactgcaggccaatggcacgatccaggcggtgcaatatcagggcgcggcaactcgttttgaactgaaattgaacggcggtgaaaaactgcttgtgagtcaggccaatatgacaggcgaagaactgcctgccacgctcacgcccggacaacaggtgatggtttcctggagccgtgatgtgatggtgccgctggttgaggagaggtgaatggcgatgaatgtattgcaaagtcctagtcgtccaggtctgggtaaggtgtccggtttcttctggcataatccggggctggggctgtttttactgctgcttggcccgctaatgtggtttggcattgtctatttcggcagcctgctgacactgttatggcagggattttatacttttgacgatttcaccatgagcgtaacgccggaactgacgctggcgaatatccgtgcgctgtttaatccggcgaattacgacatcattctccgcacgctgactatggctgtggcagtcactatcgccagcgccattctggcttttccaatggcgtggtatatggcgcgctataccagcgggaaaatgaaagcgtttttttatattgcggtaatgttgccgatgtgggcgagctacattgttaaagcctatgcctggacgttattgctggcaaaagatggcgtggctcagtggtttttacaacatcttgggctggaaccactgctgactgcgttccttacattacctgcggtgggcggaaatacgctgagtacttccgggctggggcgctttctggtgtttctctatatctggttgccgttcatgatcctgcccgttcaggcggcgcttgagcgtttgccgccgagtttgttgcaggcgagcgctgatctcggcgcacgtccacgacaaacctttcgctatgtggtgctgccgctggcaatcccgggtattgccgctggctctatctttaccttcagtctcacactgggcgattttatcgtcccgcagctggttggtcctccaggatattttatcggcaatatggtttattcccagcagggggcgattggcaatatgccgatggcggcggcattcaccctggtgccgattattctcatcgcactgtacctggcgttcgtgaaacgtctgggagcgttcgatgcactctgaacgcgcaccgtttttcctcaaactggcggcctggggcggcgttgttttcctacattttcccatcctgataatcgccgcctatgcgtttaacactgaagatgcggcgtttagttttccaccgcagggcctgacgctgcgctggtttagcgtggcagcacagcgtagtgatattcttgatgccgtgacactgagtcttaaagtggcggcgctggcgacattaattgcgctggtgttagggacgctggcagctgccgcgctgtggcgacgagactttttcggcaaaaacgccattagcctgttactgctgctgcccattgcgctgccgggcattgtcactggtctggcgttattaaccgcctttaaaaccatcaatctggagccgggatttttcaccatcgtggtcggtcatgcgactttttgtgtagttgtggtgtttaacaatgtcatcgcccgttttcgccgcacctcctggagtctggttgaggcgagtatggatcttggggccaatggctggcaaaccttccgctacgtagtgttgccgaatctcagtagcgcgttactggcaggaggaatgctggcgtttgccttgagcttcgatgaaatcatcgttacgacctttacggcaggtcatgaacgaacgttaccgttgtggttgctcaatcagcttgggcgaccgcgtgatgtaccggtaactaacgtggtggcactgctggttatgttggtaacaaccttgccgatcctgggggcctggtggctaacccgcgaaggcgacaatggtcaataaccactgatacaggaatatgctatgcaacataagttactgattaacggagaactggttagcggcgaaggggaaaaacagcctgtctataatccggcaacgggggacgttttactggaaattgccgaggcatccgcagagcaggtcgatgctgctgtgcgcgcggcagatgcagcatttgccgaatgggggcaaaccacgccgaaagtgcgtgcggaatgtctgctgaaactggctgatgttatcgaagaaaatggtcaggtttttgccgaactggagtcccgtaattgtggcaaaccgctgcatagtgcgttcaatgatgaaatcccggcgattgtcgatgtttttcgctttttcgcgggtgcggcgcgctgtctgaatggtctggcggcaggtgaatatcttgaaggtcatactagcatgatccgtcgcgatccgttgggggtcgtggcttctatcgcaccgtggaattatccgctgatgatggccgcgtggaaacttgctccggcgctggcggcagggaactgcgtagtgcttaaaccaagtgaaattaccccgctgaccgcgttgaagttggcagagctggcgaaagatatcttcccggcaggcgtgattaacatactgtttggcagaggcaaaacggtgggtgatccgctgaccggtcatcccaaagtgcggatggtgagcctgacgggctctatcgccaccggcgagcacatcatcagccataccgcgagctccattaagcgtactcatatggaacttggtggcaaagcgccagtgattgtttttgatgatgcggatattgaagcagtggtcgaaggtgtacgtacatttggctattacaatgctggacaggattgtactgcggcttgtcggatctacgcgcaaaaaggcatttacgatacgctggtggaaaaactgggtgctgcggtggcaacgttaaaatctggtgcgccagatgacgagtctacggagcttggacctttaagcagcctggcgcatctcgaacgcgtcggcaaggcagtagaagaggcgaaagcgacagggcacatcaaagtgatcactggcggtgaaaagcgcaagggtaatggctattactatgcgccgacgctgctggctggcgcattacaggacgatgccatcgtgcaaaaagaggtatttggtccagtagtgagtgttacgcccttcgacaacgaagaacaggtggtgaactgggcgaatgacagccagtacggacttgcatctagcgtatggacgaaagatgtgggcagggcgcatcgcgtcagcgcacggctgcaatatggttgtacctgggtcaatacccatttcatgctggtaagtgaaatgccgcacggtgggcagaaactttctggttacggcaaggatatgagtctttatgggctggaggattacaccgtcgtccgccacgtcatggttaaacattaaggataatattgcagatcgtaagagtatgagatgatcttgcgtactgtcagagcactgatttctctgacagtacgtgctgcgtgcaaaatcactacatcaaataaaccagccaaatctcatagagataagagtaaacaaaccaacagcagcaaagaaatttatcagtactacagttctactggaaacattcatttttgccaccttttatcattgcccctatgtgtatagtacgggttaagaaaatccgcaataatactcattctgaagatggataagggcaagttgctgtttgatgattttttctcaaactggtgaaaaaacttgatgcacgtcaaaaaatgacgcatatttgcgcgcgttttattcatctggctggacgcccgtacatgtctctctatcaacacatgcttgttttttatgcggttatggcagcaatcgcatttcttatcacctggtttctttctcacgataagaaacgcatccgtttcttaagcgcctttctggtgggggcaacatggccgatgagtttcccggtggcgctgttgtttagtctgttttaaatcttactcactggcttgacggcaccacgcagacttatatcatttggatgaatcgataaatttcacaagtggctaaggagaaagtatgagccatctggatgaagtcatcgcgcgcgtggatgccgcgattgaagagagcgtcattgcccatatgaacgaattattaatcgccctgagcgatgacgcggagttaagtcgggaagatcgctacacccagcagcaacgtctgcgcacagcgatcgcccatcacggtcgcaagcataaagaagatatggaagcgcgccacgaacagttaaccaaaggcggcaccatcctctgattaaaaactgcgtctggctaccaaccaggcgccaaccacaagtaaaattgcgccacaaattgggccgaacaacgcccgtagtggtacgccatgactgcggaagatatccagcatcagaccgccaatcagctgactggcgaccagtacagcaatagttgtcgccgctcccacattctgatatccgctgatactggcgaagacaaaaaagcttcccagcaagccaggtataagtgtccaccagcgcacgctggacaccagttcgccaaaccccgccatgccttgtttaaaccataaaatagaaacaaagagcacaatccccaccagactgttcagcaacatggcgatgagaatggtagaggaggtctgggtgatgcgcaccatcagcgtgttctggacaaccagaccaattccggcggcaatcaaaaaagcaagggtgaggctctgattcatccaatcgcgtccggttcagtgcgctcgtcgagttgcaactgcataaatgtcagatccagccaacgaccaaatttagtgcctacctgcggcatttgcgcggtgacgacaaatcccaggctctggtggagatgcaggctggcctgattttggctttcgatcccggcgaccatgacatgcttcccgcaatcccgcgcttcatcaatcaatcggcttaacaatttacgccccagacctttgccctgatgatcgggatggacataaacgctatgttccacggtatggcgaaaaccatcgaaactacgccagtcgccaaagctggcatatcccgtcactacgccgttttcctcgctcaccagcactggataacctgctaaagtccgcgcttcaaaccaggcaatgcggttatcagcatccaccgtttggtcattccagatagccgccgtatacaacacggcgtggttataaatttccgcaatggcagcacagtcggctttgcgggcaaaacggatggacatgtctggcctcaataaaataatgatgatgatgttatcaatactatcgaaaacagcccgaagcaacggattcctcgatgaaattattgcgtgttgcagaggggatgtgacggctgcaaacaaaaccaatcccgtgagcctgctactattgatggattcatgccaaaagcacaggagagcattatggggcaacaaaagcagcgtaatcgacgttgggttctggccagccgtccacatggcgcacctgttccggagaatttccgtcttgaagaagatgatgtcgccacaccgggtgaaggacaggtgttactgcgcacagtttatttgtccctggacccgtatatgcgtggacgtatgagcgatgagccatcttatagtccgcctgttgatattggcggcgtgatggtcggcggtacggtgagccgtgtcgtggagagcaatcatcctgattatcagtctggcgactgggtgctgggctacagtggatggcaagactatgacatatccagtggtgatgatctggtgaaacttggcgatcatccgcaaaatccaagctggagcctgggtgtgctagggatgccaggctttaccgcttatatgggcctactggatatcggtcagcctaaagagggcgaaacgttggtggtagctgcggcgacaggaccagtgggggcgacggtggggcaaatcggcaaacttaaaggttgcagagtggtgggggtagccggtggcgcggaaaaatgccgccatgctaccgaggtgttaggcttcgatgtttgtcttgatcaccacgcggatgattttgccgaacaactggcgaaagcgtgcccaaaaggtattgatatctattatgaaaacgtgggcggtaaggtattcgatgcggtgctaccgttacttaatacatctgcgcgcattcccgtctgcggattagtgagcagctataacgctacagagctaccacccggtccggatcgtttacctctgttgatggctacagtgctgaaaaaacgtattcgcttgcaaggttttattatcgctcaggattatggtcaccgcatccatgagtttcagagggagatggggcaatgggtgaaagaggataaaatccactaccgcgaagaaattactgacggtttagagaatgcgccacagacgtttatcggcctgctgaagggtaaaaacttcggcaaagtggtgatccgcgtggcgggtgatgattaaagtttcaacggcggcgtaagccgccataaaaatccaggcaaaaagcttattttcagctttaattaactaaccacatcattgttctgctgctaataacaacaaaggtgagtggtttatgattattcactttaatacaccaggtgaattccttctgccatgcaggcagggttggacagaaaacacgcgaaggaattaaaatgcctggaacgggaaaaatgaaacatgtcagtttgactctgcaggttgagaacgacctgaaacatcagcttagtattggcgcattaaaacctggcgcacgcctgattactaaaaatctggcggagcaattaggtatgagtattacacctgtgcgtgaagcattattacgtctggttagcgtgaatgcgctttctgtcgcacctgcacaagcatttacagttccggaagtggggaaacgtcaattagacgaaatcaatcggatccgctacgaactggaattaatggcagttgctctggctgttgaaaacctcaccccgcaagaccttgcggaactccaggaattgctcgagaaattacagcaggcgcaagaaaagggcgacatggaacaaatcattaatgtaaacaggctatttcgcttagcgatttatcatcgcagtaatatgcccatcctgtgtgagatgattgagcaactgtgggtcaggatggggcctggtttacattatctctatgaagcgattaatccagcggaattacgggagcatatagaaaactatcatctgttactcgctgcgttaaaagcaaaagacaaagagggatgcagacattgtcttgctgaaattatgcaacaaaatattgctattttataccagcaatacaatcgttaaagtaaatgcccggcaaataccgggcatcaaggtaattactcaaatctccacgcaatattcatgccgacaccataatttcgtccggggctaggttcgtaatatcgcccgttactctcattgacaatgacagaaccaacgtattctttatcgaataaattatcgacacgaccaaataaatccacagttaaattgtggtaattgtatttatacccggtgaataagccgacgagagtataagacggcgcttttgccgtattttcatcatctgccataatatcgcccatataacgcgcttccgtgcctgcataccaaccatcttccggtacataacctatgctcgcaaagcccatattacgggcgatccctggcatccgattaccgttacaatcctgttcattgcaaacattgctgcgataggtcgcatcaagccaggtccaggacgcgtttacgcgaaaatctcctgcgaaacgttgatcccatgccagttcagcgccttgacgacgggtctttccggcatttttgtaagtcgtacgcccaccgctactgctatcgacaacaatttcatcatcagtgtcggtctgaaacaatgcgagactaagcagcccatcaccaatacgcgttttactgccgatctcaattgtatcgttggtggatggttttaaacctaagttcataccgctttgcccatcagcacgataagacagctcattaatcgtcggcgtttcaaaacctcgcccggctgccagatagatattccaggcatcggtcattgcatattttaagctaccggcaggtagccatttatgataactggcatcaccgctgtcatcgccgttacccggagtaacgtaatggtcgttggaatcaaaccacacggagctgtagcgcacgccagcatccaggctcagtttttcgctcagctgccactgcgtctgtaaatagggatcgatgttccacatcagattgcgttcgtcgcgacgcaactcacctttttgcccgtactccggcatgccgctattcaggcggaagttattgtagcccttgcggttttcactcatgttttcgtagttcaggccggtagtgaacgtgaccggaacgcccagttcaccacggtgtgtccagcggctgtctattccctggtaatggcgttgcagggtaatcacgccgcccgcatgactcgggttaagttgtggtgccatgggtatactctggtactgggtcgtttctcgctctccggcatacatcatcacactcatatcatcccggctactcaggctacgctcatagcgcaacccagcctgagtttgcttgatggtttttcgcgtgtcgtactgttctgcacgaggcgcttgttgtggattagccttccattctgctttggttagcccacctgggtcatctgctttgatatccacactattgaaaatcagacttaatttgctggcttcatcaatgcgtacgcccagtttggcattggctaaatttttctgtgcgccactatggtcacgatagccgtgggtcgtaaaacgcgtggtactgacggtgtaatcgacatcgccaggctgtgtgccgtctcccgttgcgcccgttgctttcagcccatagcgccagctgccaaaactgccgtagtaactactggcttcaatggttggtggctgttgtccggtctgggtggtgacattcattaccccaccagacgcgttgccatacagggcagagaaggggccacgcagcacttccacattttgcacactgcttaaatcgatgttggatgtttgcccttgcccgtcgggcatggtggcgggaataccgtccacatacaggcgaataccgcgaataccgtaagtggagcgggagccaaatccgcgaatgctcagctgtaaatcttgcgcatagttctgccggttttgtacctgcaaaccaggcacgccggtcagactttcggacaagttaatgcgcggtgttgccaggcgcatctcctcgccatccaccacgcttactgctgctggggtatccagttcactaaccacctgcggtgcggcactgacaatcatagtctgttcatcagcggcaaaaacaacgggggaaaggacaagcagtgcgggcaaaacggtctgtcggacggaaaaaatcttcatgaaaaaagccaggttaagaatgggaaaacgccgtcatggtaatgaaattgtaaatttatggaaaatgaaacggcacaatacgttaagtaattgagaaaattgtagtcgtaacggcaagaaatgctccacatttgagaaaataatgattaccattcccatttataacaagagcgtaacgatgattacgcttagcgaagcattgtgaagcagcaaaaatatcggttcatcaaagggagtcgtcatgcatttacgtcatctgtttagtagccgcctgcgtggtagtttactgttaggtagtttgcttgttgttagtagtttcagtacgcaggccgcagaagaaatgctgcgtaaagcggtaggtaaaggtgcctacgaaatggcttatagccagcaagaaaacgcgctgtggctcgccactagccaaagccgcaaactggataaaggtggcgtggtttatcgtcttgatccggtcactctggaagtgacgcaggcgatccataacgatctcaagccgtttggtgccaccatcaataacacgactcagacgttgtggtttggtaacaccgtaaacagcgcggtcacggcgatagatgccaaaacgggcgaagtgaaaggccgtctggtgctggatgatcgtaagcgcacggaagaggtgcgcccgctgcaaccgcgtgagctggtagctgacgatgccacgaacaccgtttacatcagtggtattggtaaagagagcgtgatttgggtcgttgatggcgggaatatcaaactgaaaaccgccatccagaacaccggtaaaatgagtaccggtctggcgctggatagcgaaggcaaacgtctttacaccactaacgctgacggcgaattgattaccatcgacaccgccgacaataaaatcctcagccgtaaaaagctgctggatgacggcaaagagcacttctttatcaacattagccttgataccgccaggcagcgtgcatttatcaccgattctaaagccgcagaagtgttagtggtcgatacccgtaatggcaatattctggcgaaggttgcggcaccggaaagtctggctgtgctgtttaaccccgcgcgtaatgaagcctacgtaacgcatcgtcaggcaggtaaagtcagtgtgattgacgcgaaaagctataaagtggtgaaaacgttcgatacgccgactcatccaaacagcctggcgctgtctgccgatggcaaaacgctgtatgtcagtgtgaaacaaaaatccactaaacagcaggaagctacccagccagacgatgtgattcgtattgcgctgtaatagatatggcgagggtgaaaacggtgagacttgcctgccttttatcacggcgtatccggcactttcgtcagtaatctgaatttgcccggcacgtagccgggcaattttgcaattaactcgccgtttcaggcttaaacacaatttcctgtttttcttcatcttcctcgacgactggcgcagtgctgtgaatttcagcaacgcgtttgcgcacaccaaaccagcctataaccagcaaaataccgataatcggcagcgccgcgatagtataagtcccgttcgggtaatcgaacgccatcagcacaaggacactcagtaaaaacagtaatgtcagccaggaagtgaagggcgcgccaggcagtttaaaactgacatccgctgctttgccttctttaatcgctttacgcaggcgcatctggcacacgatgataaacgcccaactagcgatgattcccaggctcgcgaagttcaacacaatctcaaatacgcggctcggcaccagatagttgaggaatacgccgacgacatacacaactagtgtcgccagaatcccggcatacggcacatgctgacgactcattttcgccataaaactcggtgcggaaccgcccatcgccatactgcgcagaatacgtccggtgcagtacagaccactattcaggctggagagggcagcggtcagcaccacaatgttcataatgctgccgatatatggcacacccagtttagagaaaaacgtcacgaacggactttgccccgcctgatacgcgctccacggcaataacataaccagcaacaccacggagccgacgtaaaacaggccaatacgccaaatcacactgttaatggctttaggcaccatggtctgcggatctttacattctccggcagctgtacccaccatttcaatggaggcaaaagcaaacactacgccctgaatcaacaccagcgcaggcagcaaaccgtgggggaagaagccgccattatcggtgattaaatgaaagccagtggtgttgccatccagcggctgaccactaccgaggaacactgtacccacgaccaaaaaggtcacaatggcgagcactttaataagcgcaaaccagaactccatctccgcaaaccatttcacaccgatcatattcatggtgccaacgatggtaagtgcagcgagcgcaaagacccactgcggcacgccgccaaacgcaccccagtaatgcatatacagagcgacggcggtaatatcaacaatccccgtcatcgcccagttgatgaagtacatccagccagcaacataagcggctttctcacccaaaaactcacgggcataagaaacaaaactgccactggaagggcggtgtagcaccagctcacccaatgcacgcagaataaaaaagctaaacaagccacaaattaaataaaccagtgccagtgcgggccccgccatttgcagtcgggctcctgcacctaaaaacaagccggtgccaatcgcgccgccaatggcgatcatctgcacctggcgattgcccatcgctttgtgatacccctcttcgtgggcattaagccagcggcgtttcgcggcgtgttgatcactagtgtcggtgtcgtgtttactcattgctctccctgattgctttaatgaaaaagtcatataagttgccatgaacaatgtttattcatcctggcgatgatagttatcaccattattctttatgggtataaaactatcggcgcagcatcctacccgttatcgataaacgatgcaaaacatccccttacaatcctgaaggggattaatacaactgacgaaaaaatgacaaatccttttgctggttaacctgtgtactgtcctacacttaatctttaaaagattgtgaggggcatatgattaaggtgtatggcgtacccggatggggctctacaatcagtgagctgatgctaacactggctgatattccttatcagttcgttgatgtcagtggttttgaccacgagggagctagtcgcgagttattgaaaaccctgaacccgttgtgtcaggttccgacactggcattggaaaatgacgagattatgacggagacagcggcgattgcattgatggttctcgatcgtcgcccggaccttgcgccaccggttgggcgcgccgaacgtcagctgtttcaacggctattggtctggctggttgctaatgtctatccaacattcactttcgccgattaccctgagcgttgggctcctgacgcacctgaacagttaaagaagaatgttattgaatatcgaaaaagcctttatatctggttgaatagccagctcactgctgaaccttatgcgtttggtgagcaactaacgctggtggactgttatctttgcactatgcgcacatgggggcctgggcatgaatggtttcaggataatgccacgaatatcagtgcgattgctgatgctgtatgtcagttaccgaaattacaagaagtattaaaaaggaatgaaattatttgagtgggataccagaagattatgttatttattattcagtaactttatccacaatgatgggcgtaattaattaaattcatggtatgttttttaatttatatcactctccttttcattcagcgtgtctatttcatttcctctgaaaagaaactaactattcacatcgtgcagatgtttcagttgttaagtcaggcattctataatctcaaaatgtttttaatgatggatatgctcggagttggagatgcaattaatattaatacaaataaaaatatccggcaggtatgctaaaaggataaatggcgttctctgtatttattcgcaattatctgtaggacaaatatggagagcttgatgagtcagagctaaaacagcaattgattaataaacatgttgatttattcaagaaaatggatgtattttaaatgttgattcttaatataacctaatcaatagattatcaagtgagagctacacattattggaggggcaggggaaaacaccattttgggaacaatgcatcaggtactcttaccactgaagcaagatcatccggcaccaggtggtggtgcagtgctttggaaatggtcccctcgggggagttgtcattattttctatgctatttgcttattatattcatcaggtgaatttaataaattcctaatttgaaatatccactattaagctagtgtttaacgacgttaagatggcaatgtgcagatcatgttatcagggtggggcggtagcgtatattccttatacaaaccatcattcatttcaatgattgttattgaattatttattgttgtgaataaaaagacattatgaatattggtttgactttgcatatcaggttttttattactcgctgtaatgtacgagcctgtcgtgaataacgtcgagaacccatccgttgcgtttgtgattattttgttgactaaacagacacccgtttctctgaagtaaaatcccagactaaatcatcacataaccatgacatttttctgatattccccggtaacgccagataacgatgccaaatttaccgttatgttcaatcaactccctggtccatgtcgatttatctaccacaatcgccacgcgtggaggttcaaactccaccggcattgaccaggctgcagccataatgttacgccgctgggattgctcatcgaaactggtgatcaagaccgttgggccatgatttaacagacggctggcatggtgtaattctatggggatgaatcggctcatggtatcgcctcgcgaagaaggtttttttaagcgtagtccgtaacgcaataagtaacgaaattaacgggattggcgatttgcgaacgtgatgcatgtccgcgatcgcacaaaatagccggtgcggcgtctattccaggttataagttgagaaaaccactaagggaaacgcctgatgacgcccattctgaatcactattttgcccgtattaactggagcggagctgctgcggtcaatattgatacgcttcgtgcattgcacctgaaacacaattgcaccattccgtttgaaaacctcgacgttttgctgccgagggaaatacagcttgataatcaaagcccggaagagaaactggtgatagcccgtcgtggcggttactgttttgagcagaatggcgtgtttgagcgggtgttacgcgagctggggtttaacgttcgcagcttgttagggcgcgtagtgttaagtaatccgccagcattaccgccgcgcacccatcgtttgctgttggtggaactggaagaggaaaaatggattgctgatgtcggtttcggtgggcagacgctaaccgcgccgattcgtttagtttccgatctcgtgcagaccacgccacacggagagtatcggttgttgcaggagggtgatgattgggtgttgcagtttaatcatcatcagcattggcagagcatgtaccgttttgatctctgcgagcagcaacaaagcgattatgtgatgggcaatttctggagcgcgcactggccgcagagccattttcgccatcatttgctgatgtgccgccatttgccggacggcggcaagctgacactgaccaattttcattttacccattatgaaaatgggcacgcggtggagcagcgaaatctaccggatgtggcgagtttatatgctgtgatgcaagaacagtttggtctgggcgtggatgatgcgaaacatggctttaccgtggatgagttagcgctggtgatggcggcgtttgatacgcacccggaggcgggaaaataatttatgtcaggttgccggatgcggcgtaaacgccttatccggcatacattagcccggttgtagacctgacaggcgaagcgcatcagacaacggtttcagagttcaattgcccattcggcatgaaacaaaatcaccgctgtgccactaatggtgactttttccggttggttatcacgaattgtcaccgtcacttcaatcataccgtcacgccccaatgcgcgcccctgatggcctttaacacgcaacacgttgccatcgtggggcaatacgttgtgatgtaccaaccatgcacccatcgggccattggcattgccagtcaccggatcttccacaataccaatcgcagggctgaacatgcgaccatcggtttcgtttttgcctgggcggatctggaacgggaagaaaccattgcagccaatctttttgctgatagcggtcagcgcattaaggtcagggctaagggcgtcgatatccacttccggtttcagtgggatcatcactttactgtgtcctgttgttgccacctgaattggcaagcctggcagaatatcgtcctcagtgagatgaagcgcgttgataatcgccgcacgtgtttcaccttccagcggtggctcaaagcccggcgtaccttgttccaggctaatacgataatcatcgttgtgcttttcgatagtcacgcgatgttttcctgccaggcttgtttgccagatcgtgcaatttcctaaacctaacaccttcgcacgtacatagtgcgcagctactgtcgcgtgaccgcaaatcggcacttcaaccgttggcgtaaagtagcggatgcgcacatcgctgtcgtcgctgtgcagcagaaaagcagtttcgctatggcctaactcgcgggcgataagctgcatttgcgcttcgctaagattatcggcggggaaaacaacaccggcagaattgccgcgaaacggttgactggtaaaagcatcgacgtggtacacctgcggtttcattaacgttctcctgtgactggagaactatcatagcctgcaagtggccggagagcgaagggctatccggccagggtgaaattatcgccggctacgcacaatttgatatcgacgagtaaagtactcaaacggcgcgctccacacatgcaccagtcgggtgaacgggaagagcaggaagatggtcattcccaacaccagatgcaggcggaagacgaacgctacgccgttgagcatctcactgcttccaccacggaaagtgacaatgctttgcgcccaacccaccagcttcatcatttcgctaccatcaggatactgtgcactaaacggtatggtacttagccccaacagacactggatcagcaaaatgctcatgatgatgatatccggcgtagtggaagtggcacgcacgcgctgatttgtcagcctgcgccacagcagtcctgcgccgccaatcaacgtcaacacaccgcaaataccgccgagcaccatcgccatgagttgtttcgctgccactggcaaaaaccacgcgtacatccagtgcggcgttaacatgccgaacaagtgcccgaagaaaatccccaaaatgccgatatggaacagattgctccatatcaccatcccgcgtttatcgagcatttgactactggaggcgcgccaggtgtactgcccgtagtcgtagcgcagccagctgccgaggaaaaacaccgtcgcacaaatgtacgggtagatatcgtaaaaaaagacgttcagatactgaatcatttcccacctcccgcactgatgtcgacatattgcggcgcgacatcctggctaaagcgtcgctgatattgattaagcgggctgctgtcacacgccgtggcgttatcttcaataaacttcacctgttcctcttcccacactgcatcaagcgcctggcgggtgtcatcgcgctcttcgctgtttacttgttttgtgacactgtcactactaagggagcttcccgccagttgcagcagagcatcaaacaacgcgtaccacggtgcctcgcgttgttttaagcgaccgccaagcagggcgaggatcggcgcaacattgagcaatccttctttcgcctgatcgtcaggcagtacgcttaaatactccagatacagcggtagataatcgggcagttcccgacaatccagctgcaggccgaccttttcatactccgccagcaggtccaccattgcctggccgcgatcgcgggactcggcatgaacatgttcgaacagcagcaggctcgtggtgcgcccgcggtcaaacacttcgcaccattcggcctgtttatccagcagcggcgcgttaagcaggttgtgggtgaaatccgtaagcatcggcgcgtcgcggcggatcaacgccagcgcgtcctccttgcattcccacaacagctcgtccggatactccatcaacaggccgatcactttgaggatctgcattattcgccctccgctttgtcgcgcacttcggtgatgttgatggcatcgatacggctactgttgaacaggttgaatttactgtcgctaccgtggcaaccgtcgccaaaggtaaaaccgcagccgttgcgttctgcgaaggcatcgcccgccatttcccgatggctggtcgggataacaaaacgatcttcatagttggcaatggcgagatagcgatacatctcttcgacctgggcgacgctcaggcctacttcgtcgatggcacgagtatcagtaacgccttccacggtttgactacgcatatagtggcgcatcgccatcatccgtttcagcgcccgcagtaccggaccggtatcgccggcactcaacatattggcgagatattgcaccggaatacgcaggctttcgatggcgggcagcacgccttcgcttttcggcaaaccgcccgcatctgcgtaggactgaatcggactcagcggaggaacgtaccagaccatcggcagggtgcggtattcagggtgcaacggtagtgccagtttccagtccatcgccattttgtagactgggctacgctgggcagcgtcaatcacattttgtggaataccttgtttcagggcttcctcgatcacactgggatcgtgtggatcgaggaacacttcgcactggcgttcatagaggtcaacttcgcgctcggtgctcgccgcttcctcgatgcggtcggcgtcgtaaagcagcacgcccagataccggatgcgacccacgcaggtttcactgcacacggtcggttgaccggactcaattcgtgggtaacagaagatgcatttttcactcttgccgcttttccagttgaagtagatttttttgtacggacaaccgcttatgcacaaacgccagccacggcatttatcctgatcaatcagcacaatgccgtcttcttcgcgtttgtagatagcgccgcttgggcaggtcgccacgcagctgggattgaggcagtgttcgcacaggcgcggcaggtacatcatgaaggtgttttcaaactgcccgtacatctccttttgcatggcctcgaagttgcggtcgcgggcacgtttttcgaactcaccgcccagcagttcttcccagtttggcccccagatcactttgtccatccgtttgccgtcaatcagactacgcgggcgagcagtaggaatatgtttgccttccggtgcgctatgcaaatgttcgtagtcgaaggtgaaaggttcgtagtaatcatcaatctgcggcaccaccgggttggcgaagattttggttattacgcccatcttgttgcccagacgcgggcgtatcttgccattcacatcacgcacccagccgccttgccactcttcctgatcttcccagtttttcggataaccaatgcccggtttggtttcgacgttgttaaaccatgcgtactccatgccttcgcgcccggtccagacgtttttacaggtcacgctacaggtatggcagccgatacatttgtcgaggttaagcaccatgccgacttgactacggattttcattttttcgcctcctgtacctgatcgcgaccttcatcatccagccagttaacgttcttcatcttgcggatcatgatgaactcatcgcggttgcttccgacggtgccgtagtagttaaagccccaggccagctgcgcgtaaccgccaatcatatgcgttggtttcgggcaaacgcgggtaacgctgttatgaatgccgccgcgcatgccagttacttcgctaccaggaatattcataatgcgttcctgggcgtgatacatcatggtcatgcccggcggtacacgttggctgaccaccgcgcgggcagtcagcgcgccgttggcgttgaatacttccacccagtcgttatcgacaatggtcagttctcgggcatctgtttcgctgatccagacaatcggtccaccgcgagagagcgtcagcattagcaggttttcactgtaggtactgtgaatgccccatttctggtgcggcgtcaggaagttaagtgctttttccgggaagccgtttggcggtatctggcgcatctcactgacgctacgggtgtcgataggcgggcgataagccaccaggctttcaccaaaagcacgcatccacggatgatcctgatagagctgctggcgtccgctcagcgtgcgccacggaattaactcatgaacgttggtgtatcccgcgttataggagacgtgatcgctttccagaccggaccaggtggggctggagataattttacgcggctgcgcctgagtatcgcgaaagcgaatcttctcgtcctctttgtgcagcgccagatgggtatgttcgcgcccggtgatctcgcccagcgcctgccacgctttgactgcaacatgaccgttggtttccggtgccagtgccagaatcacttcactagcgtcaatggcggtgtcaatcagcggacgcccctgtgccgggccatcacgcttggtgtaattgagtttgccgaggaaatcgatttcatcctgggtattccagctaatccctttaccgccattgccaagtttgtccatcaatggcccgaggctggtaaagcgttcatacgtagcagggtagtcgcgctccaccgccacaatattcggcgcggttttgcctggaatcagatcgcattcgcctttgcgccagtcgagcacttcacacggctgactgagctctgccggagagtcatgcagtaggggttgtaataccacgtcggtttctttgccaagatgacccacgcacacttggctaaatgctttggcgatacctttgtagatttcccagtcgctgcgactttcccacgccggatcgaccgccgcagaaagcggatgaataaacggatgcatatcgctggtgttcatatcgtctttttcgtaccaggtggcggtgggcagaacgatatcggagaacaggcaggtactggacatgcggaagtcgagcgtcaccagcaggtcgagcttgccttcaatcgctgcagtttgccactcgacttcttccggtttgatcccgtcgctggcaccgagttcctcgccctgaatcccgctttcggtccccagcagatacttctgcatatactcgtggcctttgccggaggagccaagcaggttagagcgccagacaaacaaattacgcggatgattgctgctgctatctggttgttcgcaggccatacgtaaatcgccgcttttcagcgcctgggcggtaaattctgtgggggataatccggccttgtcggcttcagctttaatcccgagcgggttacgccccagctgcggcgcagaaggtagccagcccatacgttcggcgcgaacgttgaaatcaatcagatgaccgctgtacttactggcatcggcgagcggactaagtaactcctgagcagagactttttcatagcgccattggctggaatgattgtagaaaaagctggtgctgttcatttggcgcggtggtcggttccagtcgagcgcaaaggccagtggcaaccagccggtttgtgggcgcagtttttcctggccgacatagtgtgcccagccgccaccgctttgcccgacacaaccgcagaagatcagcatattgatcatcccgcggtagttcatgtccatgtgataccagtggttaacacctgcgccgaggataatcatgctgcgcccatgcgttttatgggcggtatcggcaaattcacgggcgatggtttcaatatactggcgcggcacgccggtaatttgctcaccccaggctggggtgtacggtttgatttcagcgtaatctttcgcactgttttcatcttccagcccgcgatcgaggccgtaattcgccagtaccaaatcataaacgctgaccaccggacaggtgttgccatcgactaacgtcaggtttttaacgggcaattggcgcaccagcaccggattgtgttttacgctgcgaaaatgcggattttcaatgccgccaaagtaggggaaggccacgcctgcaacagcgtcatgttgaccgagcagggttaagctcaattcggtttccgtaccggcggcaatggattccagattccatttgcctttttctccccagcggaaaccaatgctaccgttcggcactaccaattcacctgcggtattaactgctacggttttccactgcggattgttgctttcgcccagtccatccaccaggtcagatgcgcggatcatgcgcccgggaacgtagctaccatcgtcgcgaggctccagcattaccagcatcggcatgtcgctgtagcggcggcagtagttgataaagtagtcgctgggattatcgagatgaaactcttttaaaatcacatggcccattgccatcgccagggcgctatcagtgccttgtttcggtgccagccactggtcgcacaatttggccacttcagagtagtcaggggtaatggcgatggttttagtgcctttgtagcgtacttcggtaaagaagtgggcgtccggcgtacgtgtctgcggtacgttagacccccaggcgatgatgtagctggagttataccagtcggcagattccggtacgtcggtttgctcgccccaggtcatcgggctggcgggcggcaggtcgcaataccagtcgtagaaacttaaacaggtgccgccaagcaggctcagataacgcgttccggcggcgtaagaaaccatgctcatcgccgggatcgggctgaaaccggcaacgcgatccgggccgtaggttttgatggtccagacgttagcggcggcaatcagctggtttagttcctgccagttggagcggataaacccgccgcgcccacgcacttgtttgtagctcaggcacttttgcggatcgttcataatgcttgcccacgccagtaccggatcgctgtgttgcttgagggcttcgcgccacagttcaatcagtcgtttacgaatgagcgggtatttcaggcggttagcgctgtaaagataccaggagtaacttgcgccacgcgggcagccgcgaggttcatgattgggcaggtcagggcgagtgcgcgggtagtcggtctgttggatttcccaggtcaccagaccatttttaacgtagattttccagctacaggagcctgtacagttaacaccgtgggtggaacgcacgattttgtcgaactgccaacgctggcgatagctgtcctcccagtcgcggttgctatgcatcacctgtccgtgaccatcggcaaaggtttcgcccttttgtttgaagtagcgaaagcgatccaaaagtttactcatgacatgactcctgctccaggaatgaattgggatctgatgccttgtcggatgcgacacggttgtacatcaggcatcgatctcttatttttggctgaacttccgccgaccataaaccagccaggtcagcagcacacaaacgatgtagaagattaaaaacactttcatcgcgccgaccggagagccggtcatattgaggctcatgccaaacgcctgcggaataaaaaagccgcccactgcgccaatggcactgataaagcccagagccgccgccgtttcggtgacggcttcttcatgagcttgctcatcactaccgcctttcatctttacccgataaatggttatctggcgaaagatgacggcgatcatctggaaagtagaaccacttcccagacccgcagtcagaaacagccccataaatacggcgtaaaaggcgatgaaattaccggagcctgtgcccggtaaggtaaggaacagcagggcactgaaaatcgccataaaaataaagttgatcaacgtcacccgcacgccgccgaacttatcggaaatagcaccaccaacgctccgcgcgatggcaccgataaatgggccaaagaacgccaggcgcagaatattcacatccgggaactgggtttttgccagcatggcaaaacccgcagaaaaaccgataaagctaccgaaggtggcaaggtaaagcaggctcagcagccagagatgcaggcgttgtaagacagggagctggtcggcaatactggcgcgactactggcgatatcattcatcccactccatgcggcgatcgtggcaatcgccagtagcggtacccaaatccatgcggcattcgccaggctcatcacgctaccgtcggcctgcggtacgccattgacgccgagaaaggcaaatacaggtacaaaaatgaccagcggtgcaaccagctgcattacacttacacctaagtttcctaatccgccattaatcccaagagcgctcccttgtttggcttttggaaagaagaaactgatattgcccatgctgctagcaaagtttgcacctgcaaaaccgcatagcaaagcgataacgataaatatcccaaaaggagtattcggattttgcacggcaattccgagccagacgcaaggaataatcaggattgcagtactaaaaaccgtccatcggcgtccaccgaatataggcaccataaaggagtagggaacacgcaataatgcgccagaaacggagggtaatgcggttaataaaaagagttgatcggtagtaaaattaaaaccgattttattgagattaacggtaactgcgctaaatagcatccagacacagaaggcaagaagtagacaactgacacttatccagagatttcttcgagcaatatgttttcctttattttcccagaaggccggattttctggtttccagtcgcgcaaaagataacgactatttttctcattttgcagtgccatattgttcctcacatgcacacattggtaatgaaaaaaagacaaaacacgaggtaaggcgcaatagccagttattagaattaaggatgaattgggtgaagtgctgattgaaagaatagataagaaagcgtaaccgcgggggcagaatggggattaagtagccagatatgtgttactaaatgtaactaacaagctaaccttcaaacggggttaatctttgaacgtatgtcatgtttcaacccttcagatcgtgaatctaaagggttacatattaactatattatcaacaagaccagacacttatagaattagtgatgatttattcattaaaaaggccaactactggaggaaaagcttctgtccagaaggtctatcggttcctctcttattgcctgattgtaataatcgttattacagtaagtattgtttatttcatctaaggtcatgtttttaacttttatattcatctggtttacaacttcctctgtcttgtaagtgtgtatattatatggggtatatgcttttttaataggatagtgaaacaattcgttatccacatctattccgtcagagtgaacttcaaatgcaccagggctaagaattgccaggccagtattaagcttaagtgctggggaaaacaaattaaataacatgagctgcatagtagggcaattgttcttcccagaaacatttaaaaaatttaagttttgctctgttttattatggggaataaagttccaatatcggatgtattattagtatcaatgtgggttattttattattgtccagtcttaaacttttgatagatggaagataagtcaggaaatcaagatttatatatttcaactggttgttagcagcgtttaatgtctgaacattgcagaagttgctatagaatattttaatttcagaaagcaaattgttgttaataagtaacgtattcaagttgggaaataagtcattgtgtaaacttgttagtttattatgggatagatccagcagtaagagttcatttttattacctgcaacaatatcagttaattgattatggctgagattcaggtattgcagccattcgcaagattctaattgcacaaactctagttgattatgtgccgcactaaaataagtaacactactaagcctatctatatcaatatttctgagagcattattattcatagatatatgtgtaatacttacatttctgccttgaggaaaatttatactctcaagagcattactattcagacttagctttacgagtctatcgtagttggttgcatcaaaatgtgtgaattggttattatcaagattgatagatgtgaagttttgcagccctggtggttgagtggttaaattaagtccacttaaatcaatggtcacttcattagtgtcatcaattatatttcttactgcagtccagtactgcatttgtgcaagtggatcattgttgatgccgttaactaatacatgccaaagatgtttactacttattagttgatcaatgtcattggttggcagtaaattgttattgcttaagtttaaatattccagttttgtagtgtttttggcgtttaaatgtgcaatatggttgtcgtttaaagtgattgttttcatcctgggatgattgtgtaatataaggtcagtgatcatattgtgatgggcacttaactcaatcagagattcttgccgcggctgccgttggcttcatcgttatagcctttaaaatcatattcccagtgaccaaaaccaatcatttgatcattgatttgcgtttctcctttaaagccgagacgggcataagttttatcaccatcgtcacgcttatcatcagtaaaataacgtagagcggtaaccttgccataaaggtcgagtttattaccatccttgttatagacttcggcagcgtgtgctacgttcgcagctaacaaaccagttacaaccaccgcaactatttttaatttcatttaacagaatccttttaattatcgttaaacgtattttctaaacgaattttaaacggcgtcatttataaatgacatactgtttttaaaatagaatggtgattaaaaacaatgagaaaaatagatgaaataatattatttatcgatatgtgatcgaagtcgaaatgagatataaggtgaattactggtatttgaaatttatttttttaatattgtcggaatttatctgattaactaccgggccgtagacccggcagttattttaaccacgacgtgtcgccagccagcagagcagggaaccgccgcagaccatcagcgcgccttgccagaagctgaagctcagcggggcgctgagcagcacggctgcaagcgcactggaaagtacaggcgtaaaatagctacctaccgccataatggtgacattgccatgcaatataccgacattccatgcagcataagcaaatcctaaggtaaatgccgcagagatgagtttaatcatgacgggcgtgctaaatatcatttctggttgtggcgtaagaaaatagtaaacccacagacttgctcccgttagcaggacaaaaacggtaattccattaaatccgcgtgcgtatttattcgttactgtgcaataggctgcccagataaacgcaccaatgaacgccaggaaataactcaatgggctggtggtgatattattgatgatttcatcataatgtaacccattgtcaccgcctaacacccaacagacgccgacgagggctaataataatccaggtacaatcaaccagttggttttctgaccattaaacagaatggcaaagagaattgtcaggctgggccacagatagttcaccatacccacttcaatcgcctgatgatgggtcgccgcataccctaaggaaagcgccagacagatttcatagctgacgaataacagactcccggcgagtaaatagcctttcgggatttgccgaatacgcggaaatccaaccgtgaagattaacagcagcccgcttaaactatagatagcagctgcgccgccgaccgggccgagcccctcactgacaccgcgaatcaatcctaccatcgtgctccacaggacgatcgctatcagccctatgagcgttgctttttgtcgtgtcatgctcgctgttttgtctctcttgccgttaaaaattaagctgaattttatagcatttttttaactggcctgtcaggcagtggtgcgtttttctaccgctattgaggtaggtcaatttgcgaaggcggattattttgtggcaaacagatgttctttttgatttcgcgcaaaaagattcagaattttactgttagtttcctcgcgcagtaatacccctgaaaaaagaggaaagcaatggacgtcagtcgcagacaattttttaaaatctgcgcgggcggtatggctggaacaacagtagcggcattgggctttgccccgaagcaagcactggctcaggcgcgaaactacaaattattacgcgctaaagagatccgtaacacctgcacatactgttccgtaggttgcgggctattgatgtatagcctgggtgatggcgcaaaaaacgccagagaagcgatttatcacattgaaggtgacccggatcatccggtaagccgtggtgcgctgtgcccgaaaggggccggtttgctggattacgtcaacagtgaaaaccgtctgcgctacccggaatatcgtgcgccaggttctgacaaatggcagcgcattagctgggaagaagcattctcccgtattgcgaagctgatgaaagctgaccgtgacgctaactttattgaaaagaacgagcagggcgtaacggtaaaccgttggctttctaccggtatgctgtgtgcctccggtgccagcaacgaaaccgggatgctgacccagaaatttgcccgctccctcgggatgctggcggtagacaaccaggcgcgcgtctgacacggaccaacggtagcaagtcttgctccaacatttggtcgcggtgcgatgaccaaccactgggtggatatcaaaaacgctaacgtcgtgatggtgatgggcggtaacgctgctgaagcgcatcccgtcggtttccgctgggcgatggaagcgaaaaacaacaacgacgcaaccttgatcgttgtcgatccccgttttacgcgtaccgcttctgtggcggatatttacgcgcctattcgttccggtacggacattacgttcctgtctggcgttttgcgctacctgatcgaaaacaacaaaatcaacgccgaatacgttaagcattacaccaacgccagcctgctggtgcgtgatgattttgctttcgaagacggtctgttcagcggctacgacgctgaaaaacgtcaatacgataaaagctcctggaactatcagctcgatgaaaacggctatgcgaaacgcgatgaaacactgactcatccgcgctgtgtgtggaacctgctgaaagagcacgtttcccgctacacgccggacgtcgttgaaaacatctgcggtacgccaaaagccgacttcctgaaagtgtgtgaagtgctggcctccaccagcgcaccggatcgcacaaccaccttcctgtacgcgctgggctggacgcagcacactgtgggtgcgcagaacatccgtactatggcgatgatccagttgctgctcggtaacatgggtatggccggtggcggcgtgaacgcattgcgtggtcactccaacattcagggcttgactgacttaggcctgctctctaccagcctgccaggttatctgacgctgccgagtgaaaaacaggttgatttgcagagctatctggaagcgaacacgccgaaagcgacgctggctgatcaggtgaactactggagcaactatccgaagttcttcgttagcctgatgaaatctttctatggcgatgccgcgcagaaagagaacaactggggctatgactggctgccgaagtgggaccagacctacgacgtcatcaagtatttcaacatgatggatgaaggcaaagtcaccggttatttctgccagggctttaacccggttgcgtccttcccggacaaaaacaaagtggtgagctgcctgagcaagctgaagtacatggtggttatcgatccgctggtgactgaaacctctaccttctggcagaaccacggtgagagcaacgatgtcgatccggcgtctattcagactgaagtattccgtctgcctagcacctgctttgctgaagaagatggttctatcgctaactccggtcgctggttgcagtggcactggaaaggtcaggacgcgccgggcgaagcgcgtaacgacggtgaaattctggcgggtatctaccatcatctgcgcgagctgtaccagtccgaaggtggtaaaggcgtagaaccgctgatgaagatgagctggaactacaagcagccgcacgaaccgcaatctgacgaagtggctaaagagaacaacggctacgcgctggaagatctctatgacgctaatggcgtgcttattgcgaagaaaggtcagttgctgagtagctttgcgcatctgcgtgatgacggtacaaccgcatcttcttgctggatctacaccggtagctggacagagcagggcaaccagatggctaaccgcgataactccgacccgtccggtctggggaatacgctgggatgggcctgggcgtggccgctcaaccgtcgcgtgctgtacaaccgtgctagcgcggatatcaacggtaaaccgtgggatccgaaacggatgctgatccagtggaacggcagcaagtggacgggtaacgatattcctgacttcggcaatgccgcaccgggtacgccaaccgggccgtttatcatgcagccggaagggatgggacgcctgtttgccatcaacaaaatggcggaaggtccgttcccggaacactacgagccgattgaaacgccgctgggcactaacccgctgcatccgaacgtggtgtctaacccggttgttcgtctgtatgaacaagacgcgctgcggatgggtaaaaaagagcagttcccgtatgtgggtacgacctatcgtctgaccgagcacttccacacctggaccaagcacgcattgctcaacgcaattgctcagccggaacagtttgtggaaatcagcgaaacgctggcggcggcgaaaggcattaataatggcgatcgtgtcactgtctccagcaagcgtggctttatccgcgcggtggctgtggtaacgcgtcgtctgaaaccgctgaatgtaaatggtcagcaggttgaaacggtgggtattccaatccactggggctttgagggtgtcgcgcgtaaaggttatatcgctaacactctgacgccgaatgtcggtgatgcaaacagccaaacgccggaatataaagcgttcttagtcaacatcgagaaggcgtaagggggcgaacagatggctatggaaacgcaggacattatcaaaaggtccgcaactaactccatcacgccgccttctcaggtgcgtgattacaaagcagaagtcgcaaaacttatcgacgtttccacctgtatcggctgtaaagcctgtcaggtggcgtgtagcgagtggaacgacatccgtgatgaagtggggcactgcgtcggggtttacgataaccccgccgatctgagcgccaagtcctggacggtgatgcgctttagcgaaaccgaacagaacggcaagctggagtggctgatccgtaaagacggctgtatgcactgtgaagatcccggctgcctgaaggcgtgcccgtctgctggtgcaatcattcagtacgctaacgggattgtcgatttccagagcgaaaactgcatcggctgtggttactgcattgccgggtgtccgtttaatattccgcgcctcaacaaagaggataaccgggtatataaatgcacgctctgcgtcgatcgcgtcagcgtcggccaggaaccggcttgtgtgaaaacctgtccgaccggggctatccacttcggcaccaagaaggagatgctggagctggcggaacagcgcgtggcgaaactgaaagcgcgtggttacgaacatgctggcgtctacaacccggaaggggtcggtggtacgcacgttatgtacgtgctgcatcacgccgatcagccggagctgtatcacggtctgccgaaagatccgaagatcgacaccagcgtaagcctgtggaaaggcgcgttgaaaccgctggcagcggctggctttattgccacttttgccgggttgattttccactacatcggtattggcccgaataaggaagtggacgatgacgaggaggatcatcatgagtaagagcaaaatgattgtgcgcaccaaatttattgatcgcgcctgtcactggaccgtggtgatttgcttcttcctggtggcgctgtccgggattagcttcttcttcccgacgctgcaatggctgacgcaaaccttcggtacgccgcagatgggacgcattttgcacccgttcttcggcattgcgattttcgtcgcactgatgtttatgtttgtgcgttttgtgcatcacaacatcccggataagaaagatattccgtggctgttgaacattgtcgaagtattgaaaggcaatgagcataaagtggcggatgtcggtaagtacaacgccgggcaaaagatgatgttctggagcatcatgagcatgattttcgtgctgctggtgaccggggtgattatctggcgtccgtactttgcgcagtacttcccgatgcaggttgttcgctacagcctgctgatccacgcggctgcgggtatcatcctgatccacgccatcctgatccatatgtatatggcattttgggtgaaaggaagcattaaagggatgatcgaagggaaggtaagtcgtcgctgggcgaagaaacaccatccgcgctggtatcgtgaaatcgagaaggcagaagcgaaaaaagagagtgaagaagggatataatctcttttgaactttaagctgaaaatggcgctgtaaaaggcgccattttcatattgtagacaacgtaggctttgttcatgccggatgcggcgtgaacgccttatccggcatgaaaacccttcaaatccaatagattgcagtgaacgtgtaggcctgataagcgtagcgcatcaggcaatgttgcgtttgtcatcagtttcaaatggcgctgtaaaaggcgtcattttcatattgtagacaacgtaggctttgttcatgccggatgcggcgtgaacgccttatccggcatgaaaacccttcaaatccaatagattgcagtgaacgtgtaggcctgataagcgtagcgcatcaggcaatgttgcgtttgtcatcagttctaaatggcgctttataaagtgccatttttttattgcgtaaccagacggcgtaatcggctcacatccactgttttttctgcctctgccagactccaggcgttttgcagattcagccacatttgcgggctactgccgatcaccacggaaagtttaatcgccatttctggcgtcaaagctgcttttcctgtcagcaatcggcttgccgtactgggagcaatttccattgctctggcaaactcgcgcagactgacattaagttcgtccagactttcctgaataatgtcccccgggcggggatgattggccattttcattagtgtctttactctcagtagcgttccttcactgggaacactatcattattgttccttcctacgcaacaataatccatttagccatttcatgttggagagtgtgcgatgctgcgacccgaacatggcagtcgcagcaaaggcctcttagtgacggaaatcaatcaccatgcggccacggattttgccttcttccatctcagtaaagatggtgttgatgtccgctaacggacgcagggcgactttcggcaccactttaccttcggcggcaaactggaaggcttcagttaaatcctggcgcgtgccgaccaggctaccgaccacttcaataccatccagcacaagacgtgggatatccaggctcatagactccggcggtagaccgacagccacaacacgaccgcctgcacggacagcatcaactgcgctgttaaacgcagctttagctaccgctgttaccaccgcagcgtgagcgccaccagttttctcctgcacaattttggcggcgtcttcggtgtgactgttaatcgctaaatctgcgcccatttcggttgccagttttaactgctcatcattgacatcaatggcgatcactttggcgttaaagacattcttcgcgtattgcagggcgaggttacccagaccgccaagaccgtagatagcaatccactgccctggacgaattttactcagcttaacggctttgtaggtggtgactcccgcacaggtaatgctgctggccgccgcgctgtccagaccatctggcacttttaccgcgtaatcggcgaccacgatgcactcttccgccatcccgccatcaacgctgtatccggcatttttaacactacggcagagcgtttcgttaccactgttacagtattcgcaatgaccgcatccttcgtagaaccacgccacgctggcacgatcgcctggttttaaactggtgacacctggacccacttctgccaccacaccgatgccttcatggcccagaattacgccggttttgtcaccaaaatcgccattcttaacatgaagatcggtatgacatacaccacaacactccattttcagcagggcttcgccatgtttcagactgcgcagtgttttatacgtaacgtcaacatgatgatccttcgtaacaactgcagccttcatagttcctccttttcggatgatgttctgcatagcaggtgaggcaaatgagatttattcgccactacccagtatggatgagatctgaaaaagggagagggaaatagcccggtagccttcactaccgggcgcaggcttagatggaggtacggcggtagtcgcggtattcggcttgccagaaattatcgtcaatggcctgttgcagggcttcggcagaggttttcaccgccacgccttgctgctgcgccattttgccaaccgcaaacgcaattgcgcgggagactttctgaatatctttcagttccggcagtaccataccttcgccgttcagcaccaatggactatactgcgccagcgtttcacttgcgctcatcagcatctcatcggtgatacgactcgcgccggaagcaataacacccaggccgatgcccgggaaaataaaggcgttgttacactgggcgatagggtagattttatctttccataccactggattaaacgggctgcccgtggcgaccagcgcgttaccttcggtccaggcgataatgtcctgcggtgtggcttccacgcgactcgtcgggttagacagcggcatcacgatcggacgcggacagtgtttatgcatctcacggatgatctcttccgtaaacagcccggtctgtccactgacgccaatcagaatatctggttttacattgcgcaccacatccagcagactcagcacatcgctgtcggtatcccagtcactgaggttttcgcgcttctgcaccagtttggtctggaaaggcagcaggttcggcatcttgtcagtcagcaagccaaagcgatcgaccataaagactttctgccgcgccgcttcctcgcttaatccttcgcgctgggtctgggagatgatcatttcggcaatgccgcatcccgcactacctgcgccaaggaagacgatttttttctcgcttaactgaccacctgccgcgcggcttgctgcgatcagtgtgccgactgttaccgccgcagtgccctgaatgtcatcgttaaaagaacaaatttcattgcgatagcggttaagtaacggcatcgcatttttttgagcaaagtcttcaaactgcaacagcacgtctggccagcgttgtttcacagcctggataaattcatcaacgaattcatagtattcgtcgtcagtgatacgcggattacgccagcccatatacagcggatcgttaagcagctgttggttgttcgttccgacatccagcaccaccggaagggtatacgccgggctgatgccgccacaggcggtatagaggctcagtttaccgatcggaatgcccatcccgccgatgccctggtcaccaagccccagaatgcgttcaccgtcagtcaccacaatcactttaatattatggttcggcacgttttgcagaatatcgtccatattgtgccggttctggtaagagataaacacgccgcgactacggcggtagatctcagaaaaacgctcacaggctgcgccgacggttggggtataaataacaggcatcatctcatcaagatgattgtttaccagacggtagaagagggtttcgttagtgtcctggatgttacgcaggtagatgtgtttgtcgatttcggttttgaatccctgatactggatccatgctcgttccgcttgttcttcgatggtttcgaccacttccggcagtaaccccagcaggttgaagttacggcgttcttccatgctgaaggcactgcctttattcaacaacggaaattccagcagtacagggccagcgtaagggatataaaggctacgctgtttttttgtttttggttccatgtcactcactcttttttgaatatccatccctggggggcttttatcgtctttgctttaccgccagggcgtcggcctcaagtataaagcagataaaaacaaaaacaccattgcgcaggcaatggtgtttaatcgtcattgaggactgatggttatgaattacttttcagcggggcgttttctgccggttgggttatttactacgctggatttgtcaccttcggtaactattttgcgctggttagaaattttatggtccagtccaagaatatgacgtgcctgacggttgcttttcattttaactcctcaatcctgtagctagttttaaggacaacatcgccgtagcgaagaaacacgtgctaaacccctaaattaggttgccgatcaagcatagcaccttaaagcgtagggtgctggccactgaccacataattgatcgtttgctggtagatatcactgaggatgtcgttatcagaagcttcaacccatttggtcagctccatgagaatgtcatcttcagtgacaacaccatgctgtgcccgaaggccttgctcaatggcattaaccagagcgggttctgctgtactattttctgcctgataataagtaaacatagtgattctccgtgtctgtgtatttatggtgtctgctacggatcgcagatttataaagcacattcagcatggcaaatatttgccgcttcgttgttaagattagtcctggttgatgatttttatattttaacaccatgatattcatagggattgtgattggtatgatccgattaatattgatacaatatcttttgggttatatattcccggtaatctattgtgggaatttaatttaagtgcagaagtaatattttcgccggattttattcggaatatcctgcttatcctcgtgctgtttctcacgtagtctataatttcctttttaagcccacaggagagcaacaatgacaatccataagaaaggtcaggcacactgggaaggcgatatcaaacgcgggaagggaacagtatccaccgagagtggcgtgctgaaccaacagccgtatggatttaacacgcgttttgaaggcgaaaaaggaaccaaccctgaagaactgattggcgcagcgcatgccgcatgtttcagtatggcgcttagtttaatgctgggggaagcgggattcacgccaacaagcattgataccaccgccgatgtgagcctggataaagtggatgccggttttgcgattacgaaaatcgcactgaagagtgaagttgcggtgccgggtattgatgcctctacctttgacggcataatccagaaagcaaaagcaggatgcccggtctctcaggtactgaaagcggaaattacgctggattaccagttgaaaagctaaagcattgccggatgacgcgtcaggcgcgtgaatgcctgatgcgttgttagcatctttacagcgcccgccagcaccggagctcacgtccgtcctcccttattgctaaactttgccggacttcacatccgtgggttgccagcgggcaacgttcgtagaaaaaacagccttgcggcaacgtgcggtttcccggcagatccgttttacgtaatgcccattcttcctccagcggtttatcaatggcggggagggaatccagcaataatcgggtgtatggatgtgcaggtgccgtcagcacctgctgcgcgtcgcccagttctacaatctgcccgagatacatcaccgccacccgatcgctcatatgacgtatcacgctgacattgtgactaatcagcacataggtcagcccgtgattttcctgtagcgttaccagtaaattgaggatctgcgcctgaacggagatatccagcgcagaggttggctcatcaagcacaatcacgtcaggctggctagagagtgctctggcaatggcgatacgttgccgctgcccgccggagaacgcatgaggcaggcggtcgagatactccggacgaatacccacctgcacagccaactcctctgccaacgctcgccgctgttgttcactactacgcttagctatccagagcggttctgtgatgatgcgccacaccggtaagcgcggattaaggctagagagcgggtcctgaaacaccatctgcataatgcgttgactgccagaacggatgtactgcccgtggctcggttgcagcatacccattaaaagctgtgcgagggtgcttttgccgcagccactctcgccgacgatccctaaggtttcaccacggcggatctgtaaatcaataccattaatggcatgaacatgttccgtagttttaccaagccagtttttacgggccgggaaattgatatggacgtcgcgtaacgttaataacgtgtcagacacttataacctcctgctgcggataccaacaggcacagcgctggttgttgtcaccacacgctgtcagcgccgggacgttttcacactgtgcacctgccgcatagcaacgatcgcgaaaagcgcagccgtcaggcaaatgggtgaggtttggtaccgtccctggaatggcgggtaatagctggcgtggtactccatgttctggtgcgcattgcagcaaaccaatggtatacggatgccggggatgatggataacgtctgccgtcacgccgctttcaattacgcttccggcatacatcacgtaaacgctatcgcacagttggctcaccacggccatatcatggctgatgaacagaaccgcagttccactggcgcgggctttatgtttaagcaaacgcagtacctgcaactgcaccgtgacgtccagcgccgtagtcggttcgtcggcaataatcaattgcggctcgcaggagaatgccagcgcaatcattacccgctggcgcataccaccactaagctcaaacggatagcggctcataacttccacggcatccgggatttgcatctcttccagcaggtcaatcgctttagctctggcttcccgacgacttattggttgatgatggcggatcacgtccatcatctgaagacctattcgacgtgtcggattgaggtcggtcatcggttcctgaaagatcatcgccactcgtgcgccgcgccactgacgaagctgtttttcccgcgcgttaagaacatcttctcccagcagggaaatctgcccccgatgtacgcaataactgcccgtcggtagcagacgcataatcagcattgcggtgacacttttaccactgccggattctcccaccagaccgacaatttcaccgcggttaatctgcaaggacacattgttgagcgcgtgaacatcaccgttaaaaccggggaaactcaaatgcagttgttgaatgtccagaacgggttgggtcatgactgctttcctcctgctttttagttcaactctgctttcctcctgctttcgggtcaagcagatcgcgaataccatcaccaaagagattaaacccgacggcggtaagcaaaatcgctgcccccggaaatgcgcaataccaccactgatcgagtacatagttgcgaccatttgctaccatcgcgccccattcagcactcggttgttgagcacccaggccaataaatcccaacgtggcggccattaaaatcgcgctaccgatatccaggcttgcctgcacgatcagcggcggtagggagttacgtaaaatatgccagttgatcagatgccaacgagacgcgccaaaggttttcgccgcctgaacataggtatactggcgtacaactaatgcttgcccccgcgccaggcgcacataaaagggaattcgcacaatagcaatagccagcatggcgttaaacaaactcggcccgagagcggcagccagtgccattgtcagtaccaagctaggaatgctcagcataatgtccatgatgcgcatgatgatggcgtctgcgcgtccaccaagcacaccggatagacatccgagtaggctaccaatcatacccgcaatggcaaccacgactaatccggcgagaatactttgctgactgccgaccagtacgcggctaaacagatcgcgtcccacttcatcggtgccaaaccagtgcgccgcagaaggcggcaaaaggcgggcggttaaatcaatggcgttgggatcatgcgtcgccagccacggactaaaaatcatcatcaatagcattaatacaatgatgactgcgctggtcacggtgagcggactgcctttcagcatccataccagttttgcaccgttaaatcgcgtttgtttttgtgggcgtacggcggacgtttcctcgcttagcatcattcaccacctccacgtccgatacgcggatcaatccacaaatagagcaaatccaccaccaggttgaccagcacataagcaaaactaaccacgacggcaaagcccatcactgccgggaagtcgagcgcctgtatacttgttactacccatgcacccattccgggccaggcaaaaacggtttcggtgagcactgcgccatacaacaaatcgcccagcgccaaacccaatacggtaatgcttgggatcaacgcattgggtagcgcataacataaaacgatataccagccgggcaagccgctggcccgggcggtacgaatgtagtcttcactcaattgttccagcatcgcactgcggatctggcgagcgacaattcccaggtgaacgaacgccagcgttaatgccggtaagatgagatgttgcaacgcattgaagaagacttcaccgttgccttcaagcagcgcatcgagcagataaaagccggtaacgtgcgttggtggatccagccagtcatcaagccttccgccgccgggaagaatttgcagatgaccataaaacagcacaatgacgcccagcccaagccagaacgcaggtgtggagattccggtaatggccattattcgcaccagatgatccagccagcgatttcgccagactgcagagagtatgcccagcgggatgccaatcaggagtgccagcagcagggcaccaaaagccagctccagcgtcgccgggaaaaatatacgcaactcttccagcaccggacgcccggtacgaatggatgttcccaggtcaccatgaaacaggtcgctgacgtagcggtaaaactgtacatacagtggctggtccagtcccagttgctggcgaatattttccacgatagcatcgctggcgcggtcacccgccagtaaccgcgccggatcaccagggatcagatggctgataataaacgtaatcacgcagacgcccgccaccacgagcaccagcccccagcagcgttggcgtaaaatactccagaaggtcacgttatttactcatggtattgatattgaagacctgttccagcatgggattgaacacaaagcctttcacctctttgttcatcgccagttggtagtttttctggaacaggtacacataagcagcgtcatcaatgacgattttctgtgcctgctggtagtcccgggtacgctgcgtctggtcggtggtcgcaagcgcattgcgcagtaacttatcgacctcactgttttcatagaagctgcggttacccggcagaccttttttgtcactctcaaaccagtaattcataaacatatacgggtcggcaaaatccggactccagttgccaatcgcaatgtcgtaatcacctttacccactctgtcgcgcatggtggcgttcgccagcttttccagcttcacaatgatgcccagcttgttgagactggattgtgtcgccagagcaataggctcccagttcggatcgttatcggagtagagaaacgtcaggctggtgggtttgctcgtcactttatcccattcggctttggctttcgtttcgtcatggttgtattgcattgccgtcgcatcgtagccccacatgccttccggaatcgggccgcgcatctgttttccgttaccactcagaatgccgttaaccatgccctgataatcggtagaccaggaaatggcccgacgcagatccgcctgattaagaggcgctttgctgttattcagatacagataggtaacgcgcagactcggatactctgccacattgactttattttcctgcttcagggcgttgagttgatccaccggcagcgcatcggcaatgtcaatgtcgccacgggagagctgcaggcgacgggaggcactttcaccaataatttttacgcttacccgtttgaagttcggtttattgcctgggtaatgcggatttggcaccagaactaattgctgacctttttgccagcttttcagcataaatggtccggaaccggcggtattttgcgcgaggaagccgcgagcatcatccgctgcatgttcctttaagaccgccggattgataatggatgcaccgtcattcgccagcgtgtagaggaacggtgcgaatggttggctaagggtaaacttcaccgtatgttcgtcgggagcatcaatctttaaatctttgggaaatgcttctgctggcccctggccgatttttagtagccgctcaaaagaaagttttactgcttcggcagtgacaggtgtgccatcggcaaatttagcattatctttcagggtgaacgtccactctttttgatcgtcagacgctttccagctacttgccagatcgccttcaacgtcggtactgcctttatcaccgtccgttttgtactgaaccagccgctgataagacgggtaggtcactgtccagtcgttattatctattgttaccgccgggtcgagggtttgtggatcggcggccttaccaatcaccagcatatcttttggtacggcggcgtgcgcaaccgggaaatttgtggcaaggacgagcgcgagcaatgtgggacgaaagcttatgcttctcttcatgacagtttcctgattaactgacgtgctgtgtgccaggggatataaaacaagagaattgatcagcgagcagagggtaactcgctgcctggggtaattcgaagtgccaccattcgctggagataccgacaaaaccgccaccagtcattatcgcattcagcaacagccgattgcgctgagcggcgggcgggacggaagggtgataggcatgggagcgctcgtgcatttcatcgaaccctgcgcccatatcgaggatgttcccgtgctcatcacgaagcgtcaggtcgatcgccgtgccacggctgtgattagaaccgaccgtcacatcaacaacatattgcgggtctgggcaggcttgccacaacatcgcctgtgcttgttgtgggcgatacgcatcgtaaatcaccagttgtaacccactcagctgggcgatgctgatacttttcgccagcgcggtaatcgcatccttgtgtaacagacaacgcgcttgctgataaatagctttacctgtgatgttatcagcgcaggcgtatttcaattcgatctccagatcagggaagattacggctaaatcaaccagttcggtggtatcgctcataaacggttcctgtataagacaaaaattgctgcgctttccgcttatgcagatctcatgccatgccgggataagcgccagaatgctggcttaaagttatattttttaacttttgatcaacatttgtgcagcgtagtgcagttttggtgcaagaggggaagttaaggaaggaatctcccggaatcgtagctgaaatcacagtatttaagtgacagtgtcacgttaaatgaaaacccgcgagtgcgggcgagaggaatttgtcagattttcagcggtaacacgctgctcatccagcctggaatttcttcggcgggtagggggcgggaaaagaaatatccctgaataacgcgacagtggatcttgcgtagcatctcaaattgctctttggtttcgacgccttccgccacgacggttaaattgaggctttgcccaatgctggtaatggcttcaagtaaggcaaggatgcgtttttcggtcagacaacgatcgacaaaacttttgtcaattttgatttccgttaccggaagactgactaagcgggataatccggaaaagcccgtaccaaaatcatctacgcttaagcccacgcccatatcacgcaggatctgaatgcgcttaaagatttcggtatcgtgttccatcatcatgctttccgtgatttctaccgtcagctggtggccgtcaataccccaggcgtgcattgcatcagacacctgattaggcagttgattactgcgaaagtgcagcgcgctcaagttcacggataacgccgggatatgaatattctggctacgccattctgctaactgacggcaagcttccgcgatgacccagcgcccaatattttcgatttcaccaatctcttctgcgagaggaataaaccgactagggggcacatgaccatgcaggggatcgtgccagcgagcaagggcttcgatgccgtacagttcacccgtttctgcgaagatttgcggctggtaaaccagtttcagttggttattgctaatcgcttctttcagcgctgcgcctaaaaccaaacgctcttttaccatttcgttcatcgccgggctgaagaactgccagccgttaccgccattcttgcgaatataatccattgcattgtgagcagtggagagcaagtaatcgcggtttttacccaggtcgtagctgatgccaatactcaaggtaagcgggaagggtttatcgtcaatcattatcggcttgctgaccacattccgtagctcatcggcgatttgggtaatgttactgacgtcgttttcgaggctcacgaggacaaactgcgtaccttcgatacgacagagatactgatccggtttgagtttttcacgaaagcgattgaccacttccagcaatgcctgatcggcccacgcatagccaaggctatcaatcacatcctgaatatggtcaacaccgatgagatacaccacgggagagacggctttgtcgaccaggtcatcgaggtaattgtgcaggttattgcgatttggcagaccggtcatcggatcaaattggatgagttgttcaatatgctgacggcttttttcctgttccagcgccagcgcggccatatgctggctgatatctgccacgcgttcgataaaggcgctggtttctgctccactgctggttttaatttgcaggatccccgcaggcgcgccatcacgctgacgaatggtcgcactccagctttgcgcattttgaatttctgcaccgtgggaagaactcgcccagtgtatcggcatcccgttgcgcagtgcgaacaggctaacatggctttcgttgagtacagattcgatgttacgacaaatgatttcccccatttcatgaaatggcgggctgctgcacatggcggcgagaatattgccttcaagctggcgaatctgccgttcttcggtgatatcgctgaaagtcattaccaggttctgcagatgcgcgagcacgtcataaaccgggctgatagaggctttaatccagattttttcaccggtgcgcgtcaacagcagaaattcgtcctgatcgcgggcggttttccatagcaactgttgtaaacgaatgcggttatcggcagggaattcaggaatgttcaggagtgtatcgggctgcataccgctggcttcgctaatgcagtaaccaaacatttcggtaaatgcgcgattgcactgcacaatatggcgttccggatcgaggacaatcaccggtcggtcgagatggtcaacggcaataatcaattgtcgggtctgttctttttgcgccatttctacgctggcatcccgtaccagcgccaggtaataaactttcccctcggcgctcactttgcttagcgcaaaacgggtccagattttactgccgtcttttttctccagctgcagctcccgactcatcccctcaacacgcgctttaccgccttcacggttgtgacgaatgtattcaggatgcgcaggacgcaaatcccgcggaatcagcatatcaatgttattgccaatgacttcttcacgtttgtatccccagagcttctctgcggcggggttgaaaaacatcacttcatcattttcgttaattaacaccgcacccatcatattttgctcaagggcggggaaaaaaatgccatcggcggcattatccgcatcggttagcttcatgattacctctgcatcctggcgcatttaaagactggctttccagagttcaacacggtttctacctcgtcttttggcgatatacagagcttcatcggctatttgaatgaggcgctcatagtcaggatgaccattaaacatggcggcaccgatggaaagactgagggcaatatcttcgccgtttgcggctttcagtttggttttctccacccgactgcgaatacgttctgcggtacgtaacgtttcgttttcagaagcttcagtcaaaacaatgataaattcatcgcccccgtagcggaaaacataatcactactgcggacgttgtcataaaaggcctgagagactttacgcagaatttcatcaccagtgttatggccccacgtatcgttgatctctttgaatttatcaacgtcaataatcagcacactcagcggtgtaccggtccggttggcatgggcaatttcgcgtttgaagatagtcggtaggaaacggcggttaagtaatttcgtcagtacatccataccgacttcgtggcggcttacttcttcaaacaattcacgcagcaaggtaataatttggcttacggtatttcttatctgtaataaaaatttcacccgcagacttctgttattcaaatttctggtgttacgcatggtttgattgaaaataccgtcgaaatcctgaatcagacgggagatatggcctacttcggcaataccactaaaataatgtcgacctttatggttaaaccacaggccaaaatcagcctggcttaaaggcaaactactgcctaaatcagaatccagcaggattttatagataatatctatttcccaactaagtatactggctatttgccgttctttttcttcttcggcgttttccagtaagctgaagatacgatagttttcatcttccttactggcactactgtcactaaaggtaaacgcgcgagtcatcacttccatcgcgatatcaatactgttaatgctgaaatggtagacctgaagtttttctgcggcggaataatcgctagagaagatcaccggatagaggatttttttcagcacccgaaaccccatctcgacaatttctaccggaattcctatgcgggcatgcacttccgcgacggtatgctggatttgtattagcctttcgacatcgtcaacctgggcagaaagcacgttaataatccagcgttccatcgcactcttcaactgccgctcaacttgttcattactcaagaattcttcggcatgcgggtcgatgcggacaattcgataaaactcgatactcagataatgagcatgcgcaacggcaatttccgcggctttagcacgaatgggcggatctgcctgttcgacaagtccggtccactcatctttcattcttttaaaatacatctccataattcacacccttataaggctgggaaatcagacggaatcaaaatgaaacgcaacgtgcgagatcgactaactgcaccatattctcctgaaatatgaagatatactgaaaagaaataagcgatttaggacagtttcaatctacgctactgttcttcagaagagtatagcccatcgtaattatttttcggtgacagcgaatatcgtatggtttttcatattcatacatttttattagggatttatggctgtttaactaagtgtggttaatttgacttaagtaagcatgattattagtgggatagtttaagagggtaacaagccggtgggtaaagcaccggcttgttacaaagtaagaatgggagtttaactgccccagcgactttgcagatagctgaccgcttgttgagtctgcggtttattcagatagtcctcacggaacaagatggtgccgctaatttcgggcacagcatcgttaagatcgagctgctttttcagttccggtacgccgccgttaatcatccagtctggctctatcttactaggttcacccactttatagaaggcgataccgatatacaggcgggtcctggtcggtttaacgacatccgcccaccattttgccaacacgtcataacgcgcggcactccgactgaacggccagtaaatttggggagcaatgtaatccagcaatccttgttccacccatcgacgggtgtcagcgtaggattcgtcataggctgccgcgcctcgggtatcggaaccgagcggatcgtgacttcggttacgccacacgcctgccgggctaacaccaaattcgactcccggcttaatgcttttaatggtgtggcttacctttgcaattaactgctgagtattgttgcgccgccagtctgctttactcgcaaatgcgcctccgtatttacggtacgtttcgttatcatttagccgactacccggactctccgtatagaaatagtcgtcaaactgcacgccatctacgggatagcgggaaaccacttctgcgactatacttgtgatccagtcctgaacctcagggatgcccgggtcgaggacaaagcgatcgccagacgttctgatccagtcgcggtgttgcacatagacgctcgccggttgttgagacagagtgctattcagttccctgatagtaccgggcttcgtattaacgcttacgcgataggggttaaaccaggcgtgtactttcatcccacgcttgtgggcttcgtcgagcataaattgcagcggatcgtaacccggattttcaccaatcttaccggtcataagatcggaccacggcaaaattttgcttggccacagggcggtaccgtccggcttgacctggaaaaagaccgtgtttatgccgagacgttgcagatgatccagtttgtcgatcatcgcctgttgttgtacacgggcccggctggtggggttactaatgttaacgctggaaaccggtggccagtcgagccgagaaaccgtggccagccagatgccacgcatcggttgactgctttgttgcgtcgtggctggtggcttactacctgctggtggtgtcaccatggactctggaggcgtgcttttacaactacacagtaaaagtgccagtgcaactagtatcgctggtcttctaatcgttaatttcttgtttcgggagcagatatccatatgtgctggtttccggtaaacagatgtgcgctcattctcgtacttatccccgttaagtcaatacgacagcaagcacgaaaaagggagcgatgaattatcgctcccttgtcttataaccattcagacatggttagtgtttcttgtcattcatcacaatatagtgtggactacgtgcacgcgggtgcagggagaagtgaccttttggtgcgttctgactgttgattggctccagagtgacgccggtatttgctttgcctttacgatcatgaacagcatagagaataaagggcagggcaagtaccaccaggaaactaacaaccagtaattcaacatacatatcggtagaatcaccctggatgttatccggcggcaggaaggaaacaataaacgccataatactagtcagcagaccgacaattgccacgaccagtttcacccctttaccaccagggatattaaatgtgcgttttaagtcaggatgtttaagaaccaacacaatgtagccaataaacagcatgaaataagcacacagataaatcaccaccgtcagcgccagtgcgatcaggaaggacatgttgttaccgccaccggtattggtgaggatgatcaacgcgatagacgtaatcaccagctggctaatgaccagcgttaccggtacgccatttttgttcattttagcgaatgccgctggcagcaggtttttctgcgctgttacatacatcccgcgagaaggaccaacaatccaggaggcgatttccgccagaacacccagcaacagcagtgcggagatcacgcgaaccgtccactcaatttctggtgccacatgggacatcagaacggtaaaggtttgcattacccctgcggagaggttgatttcattacccggaatgaccatcgcaatagacaaaccaccaacagagcttaagcagattgccgccaccatcagcagtaacatagccaacggatagtcgcgccctgggttgctcatttcattgacgtgggttgcggatgcttctacgcccatataactcaaaatgaaggcaacaaatactaccagggtgcccactttagagaagtcagggaagaaggtcttgctatccatttcgatagcaacgggggcaccggagtgcagataaatagccgctaatgcgatcaaaataaatgcaggtaacaggataccggcgaagaagccaactttagcaattcgcgccgtgtatttcgtgccaccaaactgcgttaatgccagcgcccaaagaatgatgagtgctgcaatagttttggtaatggggtcttcattcagcgctggccatttcaggatgtaggagagtgcccctaacacgaaatagagcatcggaataaaaccaatggcgatttgcagatagccaaaactgatcgctgcaaatccccatctcggccccagagtattacttacccaggcgaagacaccaccttcttcccagccgtcgacggtggccatttccgcagcacaaagtcccacgggaataaaccataaaatcccgcctaatagcaggaagaagactaaactaaagccgcttgttgcgaaggtagggtattcataaacagccattaccatgcttgccgttatggcaaagaatccaagtaatgtgagctgcttagctttacctgtctgtacacttgtagccatattatccccctaaaacggtattcctgtcggaaccgcacctgttttgttctgaagcgtattcagaacaatattttccgttgctaatgccagtgaacagactttggaaattgtcccgaaacgggttcgtttcgggacaccgttaccgttaaacgttatcaggtatgtttaaagctgttctgttgggcaataccctgcagtttcgggtgatcgctgagatatttcagggaggctttgtagtcttccagcaacagttcagcaaagtccatttcgaagccgcgacgacacataatgcgcatcaccacgatgtcggtggcttcaccgccgagagtgaaggccggaacctgccagccgcgcagacgcagacgttcagagaggtcatacagggtgtatcccggatcttcaccatctttcagtttgaagcaaaccgccgggatgccttcgtccgggcgacccgtacagatgaactcatacggccccagtttggcgatttcatccgccagataagcggcaacctggtaagaggcgttctgtactttggtatagccttcacgaccgaggcgcaggaattcatagtactgtgcaattacctgacccgccgggcgggagaagttgatggcaaaagtaccaatttgaccacccaggtagtcaacgttgaacaccagttcctgcggcagcgcttcttcgtcacgccagataacccagccgcagcccagcggagccagaccgaatttatggccactagcactgatgcttttcacacgcggcaggcggaagtcccagacgatatccggggcgacgaacggtgccaggaagccaccgctggcagcgtcgatgtgcatgtcgatgtcgataccggtatcggcctggaatttatccagcgcatcgtgcagcggttgtgggaactcatagttaccagtgtaggtcacgccgaaagtcggcaccacgccgatggtgttttcgtcacaggcttcaatcatgcgtttcgggtccataaacaactgaccggggcgcatagggatctcacgcagctccacatcccagtagcgggcgaatttatgccagcagatttgtaccggaccgcacaccaggtttggtttatccgttggtttgcctgcagcttccatacgcttgcgccaacgccatctcatcgccatcccgccgagcatacaggcctcggaagaaccaatggtgttggtgccaacggcctgaccatttttcggcgcaggcgcatgccacagatcggcaaccatatttacgcaacgcaggtcgatggctgcggattgcggatattcttctttgtcgatccagtttttgttaatggataaatccatcaatttgtggacattttcgtcgtcccaggtctggcagaaagtggccaggttctgacgagcgttgccatcaagatataattcgtcattgataatctggaatgcgacatcgtcgcgcatttcgtgcagcggaaaacgtttactttctgcgatagtggaaatagacttcgcaccaaaacgactatcgagtagttcgctccttaaatccgttacttgcttcttatccattttaaactccttaaaatgattggatcgcattaaaaaagtaggatttatcgataaagtaagcaagtgcaaaggactcgtgtttaaataacaaaatcctaatgttatttatcgtgagatattacgcgaataatattttttcattgaaaaacaatacaatatgaaattcttgggtggtggtaaggtgttttatgctgttatttttatgcgcattctgtgtctcctgaattatcacgtaaaaatcagaccttaaaatatcactattagtacttgattattattttgaacgcatttataaaattattacataaaaatagcgaatattgctaaaatccccgccaacgatgtgttgacggggctgttattattttggcaataatactccggtataagtatttaccggatgagaaagatattgtttaacggcagtgttaacattctctaccgtcatttgtttcaacaattgctcctgctcagtccatgctgcaggatcgtcatattgaataagactatttacaatagtgttcgctaattgttgaacgctacgctgttggatatcgaggctgcgctgaacgttttgctggtattcattcagttcttgctcactgatccctttagccagacgcttaaccatcacttcattcgctaacgttaacagttcatcatgtcgttctggttgacaagtaaaagccagcaaatgactgatatctttggcctgaggatcaacgctgaggcgagaagaaacgctgtatgctccagatgcctgttcacgaatattaacacgtagatcttttgccagtgcgacgttaaaagcatcgagcgccatacgcgtcggcagattaacaggtgtccgggaatcataacgcttccactgactaacctgtgccacaggttcattttgttcttttacagtaacgcttgcgttgtccgtcgcgcgagttaatggtttacctgcggctaatgggctatcagagtgtttgatacttcctaagtaacgcgtaattaacgccacgagtttgtcttctgcgacattaccgacaatgacaaacgtgatatccgctggagaactaaacaattggcgatcggcagccagcgcatctgcggcagtaaactgtgcaatctgattttcttgcagtaatttcgtgcggtcatcagcatagcgcgtctcatacatctgctgggcgaatttctccgctggacgctggtcgagcgttttcaacgcctgaatttgagcattttgtaggcttgcccaaatattatcgttaatcgtgctgtgggtgattcgctggttaatcaactgaaaaccaggttcagggttattagtccgcgcgctaacggagagcaacgtattcatgccactgactttactgctcatggttacgctattttccgcactccagcgtttcaggctggaagaggagagttcgccaacgccgcttccgctaactgctttatttgccagcgcgataagacttttttgctgcgcagggaaacttaaatcgcctttattgcttacggcaataatttgtagcttttgctcttcacccgcggattttgccagaataaccctggcaccattggaaagtgttaaacttgtcagattctccgccagcgtttctttgctgctaatttccgcctgtgggtctgcgtctactgttaagcttaaatttctgcctgggaagacgtaagccgccagctttttgttggcgtactccttttccagcgccaggatagccgcaggagacaatgcttttttggcggcaacctcattgtttaccatttgctcccaaaatgcgtcctggttctttcttaactgctgccatttttccgccagactttgcacggtaatttgctgccacagacgtttgctaagttgatatgtctcttccgggctcaagaacggcgtattatttaaactgctggatgccaggcgactggtcagcatacgtaaatcacgttcagcttgctgatcaaccgcatttttcagccaggtgaggcgggtagatttgacatcatcgagttcttcagcagaaaaaccatgctgatcaatggttgccaactctgccattaatgcattcgcagcatcctgcatattatcgtctcgtgcatttacacggaaaaacaggctctgataatcgggtgcaattttaacgctgcgcgcagtgccgccagaaatagtcttcaactcgccgctctgtatgcgttcctgcagacgttgattgaacagctgaactaacatgctccattcagcttgttcgataaagctttgctcatcgttcacttgtaccattggcaggcgataatagagtgcgatgccgttcacccggttttctttatcattaatgatattaaagcgcaggtggttttcggcttttgtcggccagacgcgattttcagctgctttgttagccggaagcttacttaaattatcctttatcagcgccagcgcttctttactgtcgatatcgccgaccacgataaaggtcatattatttggttgataccagcgttgataaaattggcgcaattgtgccggtgtgaccgtggcgacagtatccatcaggccgataggttcacggtctaaattacgggtatttgccagcaggaaagggcggcgcgcctgagaggtgcgccatttcgcatcctgatgggcacgccattcctcagtaattacgccacgttcagcgtctacttcgagtttttcaaaggttgcggcattactccattcactgaagattgccatcacttgttgcagattttgtttctgcgtagtcggcaaactcacctgatacaccgtttcgtcatagctggtataggcattaacatcgcgaccaaaacgcaggcccatactctcaaatgtttcgatgactttattacccggccatgtttttgtgccgttaaacatcatatgttctacaaaatgagccacgccgagctcattgtcttcttcctgcaaactaccggtatgaatttgcagccataaatttacctgatcctttggatgagcatgcggataaatcatatatcgcaagccattgtccagttgcccggtaattaacttttcatcctgcggtaaggcggcggcaatcagccgcccggggagcaacagagttgccactaacgtcagtaagaaacagaggtttctcataattatctccatgcgaaaaccgggcgaatttacccggttaagtaaaatccgaactattaaaatttcatgctgacatcaagccagaaagtacggccactggcgtaggtcgccacaccggtgttcgttgtatcaacagcggttttgctatccagtacattgagaatatcggcactgatcgtcaggttttgttgttgcagaaattgtggcgtccaggacaagcgggtgtcccaggtcaggctgctatccagtttttcgtcaacatactgcttgtaatcactatattcgctgatgtattgcgcatttgtcttaccaaggataatgcgagctttacgcgcttcttgccaggccagcgtattcgcccacactaacccgctcggttgatgcgtgaaatccatgtttaaggagatctttaatgggttattaaaatctgccactggaacgctatcgtaagagaccagattaccgttataaaccacctggttatcaccggtattgctctcctcataaccattgtttaagctcaagttgcccttgctcttgatatagctaaagacaatttgtgggttaatatctacctggcggatatgcaggggttcggccagttcaaaactgaggctgaagctatgcgttttggttttgccatcgttgttatattcagtaatggtggttttagtcgcgctgtcggtacgactgcttttgctgatttgatcatgcgcttcacggtaaacatagtttgcacgcgcaataacgttcttaccgattttctgctgcaatcccattgccagttcatcgttataaggcgttttcaaatcctgataacgcgtcagagttttattaccacttacgctttccgtccagctattgcggatatcacgtaatcccatatcaagaatattcccgccatagtaacggttataacctgctgtaatcatactggtttgattagcaaaaatatcccattccgtcataaagcgcggggagatattgtggttactcagatagttgtcatagtcataccgcacgccgggcattaaactcacattacgccagctaatgcgatccgccatatacagcgtgtagttgtcaattcccaggcggcctttacctttatggtaaatggtatggttagttttctttccggcagcattaatcacataggattcagactggttatggcgttcagtccacgcatcggaatagatgtattccgcgccgaagtagggttgatggctaacattacccacggcgaatttttgccagtccaggcgtgttttgaaggtgtaattatctacagcctgggaaatgtgtcctaatccgccacgggtgcaacgccctgtaatatcaccatatgtacaactaagttcggtgtaccagatgtcatgatcgtgacgggtataatcactaatatgatcccaaccaacggtggtacgcagtttggcccatgcgagctgcgtatccatatcccatgccagaccataggatttattacccatttcgcgatcagactgcgggaaggtgctggtattataatcacggctggagccggtatattttaaggttaaatcgtgggtaaagcggtcgctggcaaaccaggtaaatttgcttaatgcagtatcgataacgtttttatactgtgcccgaccggcgacaatgccgtcattgctaacataatccgcgcgggtgatatcagactggcggcggcttaaaccggcggtaacgccgaagttatcagcgagttcctgattaaagctcaaggtataaaagttctttttaaaatctggggagtaataagtacttccactagagccttgattaaatgcgctcttgttattctcatcgatatggcttgttaaccagtcgctacgcgtagtgcgataacccaatttcaccttgctatcatcagcgttgaagcgtttgatctttgcatcaattaccccgccattgaagcgaccaaattcaaccggcacaaaactgtcataaagcgtcacattgtccagtaagctgacatcaagataatacccctgactcatcccgctaatattggttgcactactggcatcggactcattcgctgggttcaggttattagttgcactaataccgtcaatcaaataggcattctggtaggggctcgcaccgtgaatagagattttctcagggcgaatatctccctggttcaagctggtactttgcgtactatccatgcgtaccgcagggttggttctcagcagatcgctgatattgccattcccggtcggtaaacgctcgatgctttcactggtgtaatgcgtgttgccgtttacgggtacagggacaggagcatagaccgtcatctcttcaaaaaaatgcatgtacatgtttttgtcatcgacggcctgcgccacatcagcgccacataaaatgacgccaggaataagaactcgcttcatttatttatatctccgtacagcagggcttttattgtttttataaaaccgcgctaatgtcacaaatatcatcggccaggttccagacaccgggttgatgtgtaaccataatgacgccgcttgtgggtagtttttcacgcactaaacgcagtaagcggatagcctcttgttcctcaagatgagaggtagtttcgtcaagaaatatccatttcggacgtcgtaaaattaatcgtgccagggcgatacgttgtttttcgccgctggaaagaatatctccccagcgatcgtggtcatgaatacgcgcagccaatttcccaagaccaacctgatgcagtacttcgctcaagcttttatcgtctacgggcaggggaagtgctttacaaataatctctttcagtaagccggttttgattaacggtgtttgactcacataccaactgtcagcaggagaagaaatatcacctttaaaccacggccagcagtgggataatgttttaagcagtgtggtttttcccgcgccagagtagcctttcagtaatagccatttgcctgggctaacatgaaagttcaggttctctaatatgatcttattatcaggcgtacgaatactcgcatcagccacttgtaccgcatgttggcaatttttaggcttattcgtagggcgctgttcagtgagttgatggaactcatacaagcgatcgataaccgcagccagttcagcaagttcgtcatatttataaataaaccagcttaaattgttgcttaccagcataaatgcctggcggcttttcatcagtccgcccagattgatctgcccgctaataaactgcggcaataacagaaagtagggaagaacgctaaggctgcggctataaatattctgccagtaatcaagccaccgctgacgattcattaaacgatgccagttctctttaatggtatgaaaattgtcgctcaactcctggcgttgtagagactcagcattgcttagcgcaatcagttctgcctgcttattatgctgcacaagatttgttcgaaatgtcgcttcgctacgttgtttttccacattaagcggacgaatacgtttacccaccttatgggtaaataaagttccaccgatcacaatgagcacgacggtatagaccatatacccctggatattccattctgttccaccaacagtgaaactgagcgtacccgcgctttcccaaagaataacggtaaaggtgatcagcatgctaagactctggatgaagccaaaactaagactgagcgttttgctgatcagtaagagaatgtcttcagcgatacgttggtcagggttatctgtatttttatgctcgccgtagatctgcgtgaagtagtagtttttatctgcaaaccaccgattaaggtagtaatctgttaaccattcgcgccagcgaatagtcagtagtttaattaaccatgttttgtttacggatattaatacaaagatccccagcagggcagggaaccaaaggacaagctgccaaagcttatcggtttctttctggcttagcgcattgaaaaaatcattattccagtcgtttaaccagacctgaattttaaccacgccaaggatcatggcgaggataataatgattaacaacacactagttttattattcttacgcagccaaaagggcttcaacagacagagatactttgctatcaacatacgaagcgtaatgggaatggttatcattagcgaaaattgattgtgccatccaatgattatctatggcaatgatttactgatgaaatttatttaagtatcatttaacaatatgaaatataaaggaatatttcattttcagtggttatggttatgctattgataatcaaggatattgctaatgccctgatgcataccacgtaagccaggattttcgcaagggaagatgatgatgacgaaacacccgacaggaatttatgtcgggtgccttgttaaggtcataagaaggaggctaagaatggagttaaaagagagcgttattaattattctccatttgttttgcaacatccataatgtggtaaagcggtactctgttcttagctaactctaccatggcgttcatataaggtaccatggtactaaaaaggattttataaccttcgcaaaaataagaaacagtctcattgtttactttagtaatacgatgcttaggacaaccgccattgcagataggtttatatgcacattgctgacatttcgctggaatccgttttttttgcgctgtcagttgtacactgttcatcgttttgagttcagatttattaatgtttccaattttgtactgtggatagacaaaatggtcgcattcgtaaatgtctccattactttcaacaaccagattatccttgcaggactcctggaaaatacaactggtatgcccattccccaaaaaacggctgacaaagctttcaaactgacggatgaaaatttcacccacatcgtttttaacccattgcataaaaatggtactcataaacttgccataagccgtgggaggcacagaaaaatcaatgatacggaatgtgttctcactatgaccactgaaatcaatattcggcgtcccggtttctagcaattcgataaattgcatatgtttactgccgatagattttaaaaaatgataaacctcaagagggtaatggacattaacgttattaatgacggttaacgtattaaactctacttgataacttttcagacgctcgatggctgctatcacttttgcaaaagtaccgttaccactattactgcgtctgtaacggtcatgtaactcctgggggccatcgatgctgataccaaccagaaattcatgttctttgagaaaggcacaccattcattattcaataaaatgccattcgtttgtaatgcattaaaaatacgtttttggcctgcatagcgttgttgatagtgaataactttacggaaaaaatccaggccagccagagtgggttcaccgccttgccaggtaaaatagacctgattgccagacgctgcgatatattgtttgatgaactctttcagagtgctgtcatccatccatttttcatgagtaaactggctctctttttcaaggtaaaaacagtaatcacatttgagattacattgaaaactggagggcttggctgtaacgtgcatcgctatctcgctcaataaggcggcggaaaaatccgccgcatgaaggtttagttatttcgcttcgcttagtgctttcttgatattgttaaacttctcctgatttacctcgctaagcggtggctggctgctgtcgataaactctcttaccacgccttgcatctctttaacgacctgcggattggcggcggcaaggttatctttttgctgtagatccgtcagtttgtagagacctaactgattgttttctactgtatagacaaggctataatcgttatttctcaccgtataagagaattggcttaagtcctcagtgttggggttatgcgggtaatcgtcactctgatggcgaacaaatttgtggtaattatcccagaatggaatattttcctcgtcaaaccagtgagaataagaggttatccaggtcagatttttatgtggctcgccttgtttcttatcttgcaaccagggcagcaaggaaacgccatccagcttaaggtcttttggaatgctgatatcggctgcatcaagagctgtcgggtagaaatccattgcggaaatcagcttgtcataattaccgggttgaagttttcctttccaccacataaacattggggtgtgagtaccgccaggataggtctgactcttatagcctttttgcgccccgttcagcggcagaggaccatcgataaccgcaccattatcggaggtaaagagaataattgtattgtcatactgtccgtttttcttcagttgttcgagaatgcgttttacaccctgatcaacagaataaacggaagcgtagtagttatctgctgtttgactaccggtattaaattgcttctgatattgatccggtgcaggattatcatttggcaggtgcggagcattataagccaggtaaagcataaaaggctggtcaagtgttttggcacgatcaacaacgccaattgcctcatcggttaactgatcgctgatataaccttttgcggggacacgttcacgatttttgaacagactaggggagttgtaatatgccgttcctgcagcgtggaatcccataaagtaatcaaagccacggttttgaggttgccattcttccgcagaaaatgtggtgaagttgtcatgatagtcacgcgtttgtttatcttccggtaccggcacattactgattttactcaagtgccatttacctactgctgcagtgtaataaccatgattctggaataattcaggcaagaaagtttctgttagcggaataccatcctgagcatcggtattggaatagacaccaaagcgggcgggagctcgaccggtcattattgcggcgcgggaggggccggaaacaccgtgtgccacatagccgttagtaaaacgtacgccttcatccattaaactaaggagcgtcggcgtacttttttgtgcagcttcaatggctttatctatccctattttgtaggtatcgacaacttcacgattttccattgtttttgggtcaaaagatcccttatcaaaaggaagttgtccataaccaagatcatccatggtcagtacgataatatttggctttcctttggtactgtattctgtcggcgtaaagtcactgaaagcaacgtttgttttggttgctttcagctttacatcatctgccgcatgagcagcaaatgcagccataccagatgccagtatcaaagatatgctggtacttacgacacttttctttaatgcagacttcataaatgttcctcttcttattgtacttaattccaaagtaattttacgaagagaaataagtggatgtaagtgaagttagtcacataaagagatagcagatttagctaaaaaaagggaaaaaacagtccataaagcgttgacattactttctgttctattaagtaatttctcgccgataaacaactaatttattgatatttaataaattattgcattttactgacaaaatgcagaattgagatcataaataatcatgcaacaggttatgcaagtgcataaatatgtgatggatgtcacttatttatttcaataaatatatcgcctaaaaacaacgcggggcagggaatggctgccccatttaattcttacgcagcgtgtgtggttgactactcgttagcaaataatcaaatagctaaagcattcatcgtgttgcccgtattcatacccgtgtgactttgacaacggtactccttagaaactctcttcggactgttgccgaaatgtttgcggaacgcataaataaaataagatgtactggcataaccacattgttcggcaattttattgacactaccttctacgcgtatcaaattttttgcgtgctgcattcttgcatctaaaagaatctgactgaatgtcgtttgctcttgcttaagttttttcttcaacaggctttcactgatgtacaggcagtcacaaatatctttcagcttccatgggtgcgccggcttcatgttgacaatatttctcactttcccagaaacggatagcacaccgttagttaatagtgtaatgaaacctttgcatgcggcaaaaatagacaggcaagaaaaaagcaaaagttcactaaaattatgatgattgcgttcttcgctgttgagataagcaatcatttcattaagcaatccagtcggtacattactagcacgtaaaaacttcgcaggaacaggcaccgtcactgtctggatgttagtgcattgtagatattttttaatggtattttcagtaaatccgatctctttaaaatgccgctcataaggttcaaaatgcgtacgaacagcgttatctaccatcaggatctcgccgtcagagaaggcgtaatctttatctaaaatgttagcgttgaaggcatgatgaataaatataacagaacaaacgaggctcattttatctccttaaaacaataaagtttttatcgatacttttttaacatttcatatttataatttgctgtttgttttcagccttgcaaactattgataatgaaatgtgtaagatctcttgcaatgcgacccatttctgaaatactcagctgatcaattgccgaaaaaatggctatcaacgtaagtgtcagtaataagacaaccacaattgcagacatgatttctttatagttgtctctttgcgtgattttgtttttcactgtggtcgcatgcatttcaaatatgtttatttagcggataacgttaaaaatcgttaatcagtatgcttaatataacaggctggagaaaagaggaaataggactggtgcttcagtactgagcggagtttcttacagctgtaggcagaagtttatatcttatagtatgtagtttaatttaatccatgtgagcaaattgcgaaataatagtcaatgaggaattcttctgctgtgcggatgacagcagaagaaatgagaagaggcattaattacttggttctaattcaaccggaatacttttatagccaggaatgccacttaatggatcgtggttatcaagtgttagcatgtgattgctttctggaaaataggtcaccagactgcggtcagccatagagtaaatgaccacttttaatctatccatgcggcgactgctgcgcttaccgtctggcgtaagcgcaataagattaactctttcgccgttttttacacggcaaattttagcttgtttagcactcataaagaccacatctcgttgaccgaatacccctcgatagcgatcatccataccataaatcgtcgtgttgtactgatcgtggctgcgtactgtcgccatgaccagcttactgttaaacgcactagagggatcttctaacagccctttgctggtaatgaaattagccttaccactcggcgtcatccagcgcctttcagcagctgcatttatcaggtgaaaaccaccgggatgacggatgcgctggttatagtcggcgaactctggcagcacagcttcaatgtcattgcgaatgcgatcataatcttccaccagatactcccaggctaccacgctctggggtagtgctgcctgcgcgattcccgcgaccactgcacactcacttttcagcattacaccggcgggttttaacacgccacggctggcatgaatcatgctcatactatcctcaacggttaccgcctgcgcaccgtttttttgcatgtcaatctcgctacgtcccaggaccggcagaatatagctatgccgtgcggtcaacagatgagagcggttaagcttagtggctacgtgtaccgccaaatctaattgcgttaacggtacagcgctcgcttcccgatctggcattgccagcgcaaaattgccccccatgcagatcaatgctcgagcctgccccgtacatattgcttgcatgctggtaattgcagcatgtccaggtgcatgaggtggggtgaagccatagcgctcacccagacgagccagaaactctgcagacggtttctcggtgataccgacggttcggtcgccctgtacattagagtgtccacgtagtgggcagatacccgcaccaggcttgccaatgttacctttcatcaacagcagattgaccagttgctgtacgttctgggtaccatgttcgtgctgagtgatccccattccgtaacagataatggtgcgttcggcagcggcatatgcgtcagccagttcggcgatttgtgtctgacttagtccagaaatacgttcgatatctttccactcggaattgagaacgtcacggcgtagctcgtcaaagccgacggtatgcgtttgaataaactcgtcatcaagcaaactaggccgacctgcggcgcttgcagcatcatcgcgctcaattaacaggcgcatcatccccttgagcaacgccatatcgccaccaatgcgcacgttatagtaggcactggccaactgagtctcagagttcgtcagcatttcaaacgggttttgcggtgcggtaaatcgctccaggccacgttcctgtagaggattgatggcgatcattttcgctccccgtttcactaaagcgcgcaagctagtcagcatgcgagggtggtttgtaccagggttatgcccaatgcaaatgactaaatcgcacttctcaaagtcttccagcaacacggtccctttacctacaccgatactcgctgccaaacccacgcttgtcggttcatggcacatgttggagcagtcgggaaagttattgctcccgtattcacgggcaaaaagctgataaagaaaggcagcttcattggaagtgcggccgctagtatagaattcagcctgattgggatcactatagctttgaaggcgtgcgccaatttcgtcgaaagcttgttgccagcttaatggcttgtaacagtcgctgacggcatcatatttcaaaggctgagtgagtcgccccgcagcctcaagctcgtggtctccccaggtaagtaaactttgaaccgtattctcagcaaagaaagaggcgtttacctgcttatccgtgacttcccaggcgattgcttttgcgccgttttcacaaatgtcgaaactcgcactgtgcttaggatctggccatgcacaacccggacagtcaaagccctctggcttattcatgtcaaacatggcaataacatcctggcgtatatccatctgcttacgtactgcattcgctacggatttaacagcaccccaaccacctgcagcaccctggtaggattcaatttttttcttcatctacttatcctgtgtggaaatgaattattaggatttgtaatagcgatgatgcacagtacatacaaagggattatcgccaacatggatatataagagtaggggactactctctttctatttttaatctattatcgttaaacaatagattaaatacgataagttaagcatcatctctcatagtgtttaaattaacatatttttcaatataaaaaataagactctggcttcaattgtgcgcggattttcttacaggtgtaggctaatagccttcacaaaataattatccgcgcaattttcgtgaatggagcgcatagactaaggtcaaaatcacaattattcatagataaaagtgacaccaatgacactctggacggttccggcactaaccttgtttcctgtttgtccataggttgcgcttaaacccagaggtactttgcttttatttactgtccccagggagacattttctcccgtagccagtatttttccattacgcattagagtgacacccactccgcttgcttttgttgcatcaggtgctgtgttagcaaacacttgtcggctactgtcagtggtggcaccgctaagataaaaactgagcttttgttcgctactgcaatatacgccaaggggtatttctgcgcttccaggaaagtccgggagatccacggtgacatttcgactatcaacggtgcagccgcctgttggcataacaacattgttattactaataatattccacgtaaaattacgcggatttccgcttcctaatgttgcaattttatacatatgaatacgggcaatgacttcccccgcttttatgacaactccaccggccgccccaactggggtaatatagagttttaacggtaatggcatcggtgtcttatcaccaatatccaatacgttggtatttgtcgtcaacgggaaggggtaggtcacattattccagtacaggcttcctttataactctgtagggagcctgcgaaagcactgccttgtaccaggtttatatgatcagtgtcgtaccagccgccgtaatcattccagcaacttatatgctgagacaagtctacaaccagattctggcccggctgtattacagggtcgagattaacataaacagaggttgtacctgctccaatactactcccgccatcgacattacaactgaaggcaaaaactttgcctgccattaatagaagataaataccgaacaggacctttatactgattgttttacccatgatatatcctaaggttaaaaattgatttaaaaagaaggctaagaaaatcgaatcgacgttattgccaggtgtagatcacattgattagcgcctcgatcgttccctggcttgcgtttccattcaccgtgatagctcttgccttaagtggaaactgtgcattacgagtgatctcatcaacaataaccgttttgctatcgccattttttaacgcagcatcctggtcatccctcagctctatctgaatattttcggcagtaccttcatttttgtaataacccgtattgtcagtactacctgtcacgattgccgtcactgcacttgtttcaaccggacaatcggttaaactcaaagtaatattgtgccagccagatgcagaaccaggttgttgcagattgcgcgtataaagatccccgagattaacgttagcttctttggtttgaatagtgcagggtttagcgactacccgaccattaacagtgatagtgacatcggcggcctggagagttgctgtgaataacgcgcaaaacgtagctaacaggaacctcttgtgaagtcttttcatatctgactctgattattgaaattcaagggtaaaggttgcgctagccctcaccagtcccggattgacggacttctgagtactcttcagacgagcggagtaaggcaaaatattgttctgttctggtaccagtgggatccactgcatcccggcatgaagatcattcagtttcaccggacgcatatttgcgtccaatatttctatacccaaaccggaggccgtattgcttccttcatccagtttcaacaaagtattattttctgcatcctcaataccgttaaatgcaacccgaacccccgttgtccctttgctgcattcacttaacgtaatctgaaaagggacggctggacttgtgctaccggtcgttggaaattgtctggcactgtttttttggagatctacggtaaaattaaggctatcgctactgactgtgcagccataatcgaggacgcgcccgctaattttaataacgctatctgcggataaagcagaataggtggttaaccccagacataaaccgaggaaaataatgttattgtatttcataatctattgttccttagcgacagattgctgtctgctggttcagtaaggtaccaggagaaacttcaggaagcttgtactcgacaatacagttactgtttttatctttgccccaactaacctgtaattgcccactctgtggaagtccagtcagataaacctgaccattttccgcgacaatgctgccatttttattctctccgtgtgtgacaattgcaccgaatggaacgctcttattaccgtacttcaacgtcattaatactttcccgccgatttgtgcattaaatgttgctctggcaatagcaccgtgagttgggatgacagtgaccacggtttcatccagttcaacattatctgcaagggaattcgcgttaagagcaacacggttttctctatattctgtcgcaaatggtaatatggcatagccacgccagtcggtatgaattccggtctggttctctattttgacattatcagcaccaggagccttaaccagaaccattgtgtcgcccagcggctgtccaaaggtgatgccatcagcatgagcaataatcccaccactcattccgtaataaatctggctgctgtcaccactccgactgtaaccgacattagtattaccataagctccacgataattaagagaactgtaaccactagtgccagagcttgtattacctccgtgggtgttaccgacctgaacgctataattcaggttattatccggcagcagagtgccataaaccccgcttagattggtcatgccgcctttcaaatcgttactcatactgtaactggcgttactattacgaaatgcgctctgactgtctgtacgcatccaatgactgaagggaacattaagcgtaaaagcgagtaaatgatcccgatcgttttgccatatattattggaatagctgtaattcaggctagtcgtaatatcaccaaacggcacatttaatccaaaacttatttgctggtcgctgcgactcgtgttccagtaactttggcgactggcactgaaaaatgtcgtaccgtaatttccaagctgctgagagatgcttatttgttcctgaccacgcttactgtagaacagattaaaataatcaataaattgtgtctgctcattggtgtctccggtaggaggcttgacggtgtaaccactcattcgactgtaggcactgtcggataagttataaaaaccttgcgtagaatagcgatatcctgcgacctggatattggttccacaacaagtttattgctgcacttgttgaagagagtatttgcaaaaacattttatgtcgctaaataacatgacgatttcattatgcatgttatttataaaccgtgactaaacagaatattattgcgaacaagggaagtgtcaggaaaggtcaagagctaccaatggttaatatggctataaatcattagctatggttaatgtttgcttgctgaaactaacaccgaattgctctaaacagataagtgcagggtttattaaagctgtccgacagactttcttaacctggtaatatctctcttgggtgactctccaaacatccgcgaatattcccgacactaatgggatagctttcgtaaccgacagcataggctgctgtggtgacatcgtaatgttcattcagcatctgtcgcctgacttcattgagacgtagccatttctgataccggagtggactcattcccgcttgatccgtccttaaataagtaacagcaccctctggtgttttcgtatgcagtgtctatgcgacagacactgcgctcttagcatggggcagggaataaccaggctatttctccatgcacaggccaattatgaaagaggagaggcttaagttcttgaaccctgaacgaataacgactaccagaaaagcacttcgcatcactcagacatgatttaacataatatacattatgcgcaccaatataaaccaaggaagaatccagtcgttggcggtcatgattgtcatgctcattaacaatgaccaaaccccatatctcacttactaccgtattctcggcttaaccgtccatgcaacctcaacacattgctttcaactgccgtcaccacgttctccggaaaatctgtcggtaaactagtcttcacgttatccagtgctgctggaatcattctggcaaagtcactcaggatttcatgcatctgcacttccgggaatctcagcacctttgctgtcgccaaaaaatgtcgcggataaattttatcgattgccgtttttttgcctttggatgcgttaagccccattgccagtttgagatcgctgatgtgtattcccgtaccgccaaggaccggaaatgcactaatgatgtcgtaaaatggcgtgagtcgataactgccgccagcctgaataaatacggagaagttttttgcatgaccgtccgttgcgccaatcaaccactggaagacctggaatttcataaaatcatagcgatctttcagcgcctcgctggaccccatcaaaaaagccatgatccgcgcgatgcctgggcctccatcactttcatatttcacgctactaggtaaaccgaatgtctgacacatatcctcctgtggcaagcgaagtaaaaccgttcgctcagcattccaacgcctgtcaaagcgttcgaccgctaacgcgcgcacatttcccgctttaatgatttctgcgtccggaacattcaacccaagttctttcgccagcagcagacagtaatactcattatcaacgctttggctgagatcgagcgtcgcattgggctgcctgatttcgccaatcggtaatttaatgatgtgcgtcgtcggcgttattcctttcggaatgcaccagtcattgcctattctgagcagtgctgtcttctcctgtgcgccagcaacgctgatgcgaaagtcattttcttctctaatcatgcctagcgggatatctgctttataagccgttaatacttcttcaagtctggcttcagtaagcttttcccatgccattatcggatgcgttacggtttcgtcttcgggtattaacgtcacggcaccaacgctgtctcgccctatttcactcaataaatcaaacggttgtctggatttggcatgataacgtttaacgatccggtcacgtacaatcgggctatcgggtaacaggttatcgaagaagttaaatacggcatcagaggtgatattccccctctgcaatggcaggctaagactcaacggtctggcataacggcttgctaaccactccggtgcatacttaaaggtgtgcgcgccgttggctaacttcgttaactcgcctacccgctggttgttcatccaagtgacaagtttaggcattaccactccagattttgctgttctgtactttctgggctggcatttttcgcgtcgcatagcgtcatactgagttcaaggctctgtaaaatcttaaaaaatgtcgtgagcgtggtattgtcagggttgttttcgaaattggaaatcgtcgcctgcttaataccaatttttttcgccagctcgctctgcgtccagccattttgctggcgaaccagtttcattgcattcgccaattgcgttgggctatagatcttctgaaagctcatcatgtcatacgtccacagcaagtttatccgcttaaggggatattataagttttatcctttagtgaggataagtcaatctggaaacacatcttatccgctctacgggataaacgctgcgatatccgcgatcgcggataaaaaggaggatttaaataaggcgttgatgcgccgtttgaagtcggcaatattaagccgcatgccatctcgacatgcggcttatacggtttaccagctatatttcactcccagcatgccctgagtatcgctatagcctttatcacctagttgcacaccgacattcccccacaggctaaggttgttatttactttcgcctcaaccccggtacgtacttcaccgagattacgcgcaccttcacggcctacggtttgaccattcatcttcacggcgtagactttgctattgttgatccagttcgcttcaatgtaaggctggaactcacgctgtttaccatcgtcacgctggtgatggctgttcaggtaggttttcaccccaagtcgcgtttgcacatttccgtcgccttccgtttcaatgcgcgttccgtctttccgggtatggtcggaatctttcacacccatccaggtgatttgcgcctgtggctggacgtaccaggtattcagcgtcccttcgctgccgctaaatgttcccgcttcaaaggtatacccaccctcaacagaggccgtcacaccgcgagaatcatagtcgtcagcagaacggttatcggaactgacgctgttatcaaaccagttatacagcgcccagctgtcaacataagcgccggtcttattcgcatcgttctgataccaggtcgcgtacagcccagcgctgtaaccgctgatgcgcccatcgcttttataacccacacgattactctgagtattactgtgctgattggcgtagcctgccatcacgccaagatgccagcgatcctgcgcgttgctactccactgcgccaaatcgccgcctagctgcaatacatagcggttagcctgagtatttagctgaccgtcaccggccctactacgttcgtgccctccgacatgacgcatccacatactgcttgcgctcccctgagaatgcagactatctgtatactgcggctcacccagacggtcgtgtaaacgatggctaaacaggctgttggctgcggcaatgttgctgatatagcttccggcctccgggcgataaacacttgggccttccggatccacaacagggggattattgatgggatcgggtgtatccgctggcgttacgccgtcccatttactggtcagataccagtttttctcgtcattccccttccctttagccagcgtgtagacgtaagccccagcttcgacagttccggtggtcagcgcgaagttacctgcagaattaccgccaacctcaatgagttcaataccgttgaccgtttgtgcaccgacgccgccaatgttatcaacccgaacgcgagtgttcccttgggtatcgcctttcacgttcatcttatcggtggggctattatcgccgcccagcgtcgcgttgaacgtcatcaggccattgtttccggtatagttgccgttaacggtcagtacattccccggtttccccccttcgctattcatttgaaccgtgccgccattctccaggttgccgccgatagtggttttagcgacacgcagtgccccccccaggcataacgttcatatcacctgcagtggtgacatttccgctcatcacaccgctgttatggatattaatgtgttgacttgccatattaatggcagagtcggaaccgaaagcaatttccccccccacgatatccgtcgtaccctgatatgccgcggaatcgttgttaagagtcaggatcccggtacccagttttgtcacatcaccgctaccgctgatactgtgcgtcatcgcccagctacgctcagtggagatggtgagcaggccattattgataacggaagcatcacccaggtttttctgctcgttgacgctgagcgcgctgcctgtatcaatgttgaattgccccacaaagcggctattatcgccatccaactctacatctgtcctggcggttgcgctcacgatacccttcccgcttatgctattacgcagttcgccagtcacgttttttagcgttaacagaccgtcattggcaatatttcctctgcctaacccctgagtattatcgaggctgacttccgcatttgggctaatgctggttaacgcattgtagcgtgcattaagcccctcgatagccagcgttccccctgtaacattcaggtttccgccacctgtcagttcaccctgactgatcccacctttatttaccgtcagcgccccctctttgaacaaaacagtgctacccatctgcccggtgaatgtctctaccgtctgcgtgcttccattaagatcgacgatggccgcgttgctgatgttcagttcccgggtgttgccaagtgcaccatccgcatcggtacgtaatgtccccatctgaacgtaggttgccccctgatagtcgttctgaccgttggaaaggctaacctgtcgcaccgtattgattgccagatccccttcaccaccgatttttgcgctcatatcggccgttgcgccataggctccgccatgttcggctaacgtcagcttttgcccaccatggatgttcagcgctttcagcccatagttaacgtacaaaccattacctggtgcggtcgtgaggcggaatccataatcaccctcggcgaccaccgttccgttttgcgcaatgtgtaacgttttgtccgcttccacctcgtcgccctgtaaatcacgtaacgttaaactgccaccgctcccaataaccgtttgcgccttcaccagttgaacgccgacatggctatcgtcgtgttccagcaaattgagcgtcgtcagagggttattcgccatgggatcattccacggtttaggcacgtcgataagcacgtcgcccgtcccgtttacctgatagttacggcctttccaggtgtagtcacccgcgccgacaaccagcgtatcgacgctgatatatccctccgcgagcgtcgcagcaggaatatccgtatcgaaaatgatggtacctccattcatggccagtccaccaatggattgctctccaacttttacgcttgtggtattttcactgtcagactgcaacatcgcgtgagtaagcgcagcggtgttgtcgcgttccagagtgaaggtactgtctttcagttgggcaacaccggcgaattcagtccctgttgcatgggtaaagccaaacatcttgtcggaggaactcagctgcactcgcatcaagccatcgcctttgagcgcattggtcagcgtgtaatctcctgcactgttcgtacttgcgagaatgtcgagcgtaccggggtttgcaatggttacttcactgctccccatgcccgttaccccatctgccgtatgagacgcaatggtcaggaggccgtcattgaccagcgttttaccgctataagtattccctgcattgaacaccgtatggcctgcatcatggatcacttttccgtctttatcgtcacctgtaatcagcatatcgacctggtagccggcatcactgttattggtatgattaaagacaaaaacgccttcgccaagaccaaactccactttcgtcgcattggtgataaatccggcatctgccgccgcctcaccgtgagcagcaccaatgtttagcgttcctacagcaggctcaaaaacacctaagtaaacttctccaccttcgacattcagcgtaccgttattcgtcagggttaacgtacccgtaccagatgtccctacgtacatattgaatgtttcaagaagagagttctgcccatccaccctcacgtcgcccttacttttgtcattgagagctatctgtgtatcacgcgctttaactatacctccggtggtaatattcagttcacccgtgcctaatacaccgacctgtagcaattgtgcgttagtagaacttgtctttaaattccagagactgtccgtactaatattaactatccccttaccggaggcatttcctccgataaatccatagcccgtactattaagggtggcaccattactgacatttacgataccgctaccaaaattaccgacattgatacccacagtatcgaagctacttgtcgcatccatcaggttcagtgtgccgataccgcttgctttatcgcccaaaaaagtaatattttggcttacgaacttaccgccatcgctaatattgaggtttccgacgcccgcaacaccaatggtggtatagacattcttattgacctcccacattccccccgtggtgatgctgacattcccgacgccggtttctccataaccgagactacttcctccgttgctgacaacaagcccctgattactgatattcatttcgccgtggccgtcataaccaagattagttccgagattagtgataacggagttcttatccttaacagtaatgttgcctgtgcctgtttctttcatccccgcagtgataattccgctatctactttgccttcactgctgacattaagttcaccgtcgccagcatcaccgatatagatatagcggaaagcttcgcccgttccgaggaaattccaatgccctttatcggtcacgttgacgacaccgtgggaaccgtcctgaacgcccaccaaactatattctttgttattaatcagtccattattggaaatattgactgtgccattaccgaaatatccattatagagtctgcgtaccgtgatgacagagtcttgatcctgcacattcagggttccgataccggtggcattgccaccgataatcgtattttcagccgtaaccaaccccccctcgcgaatagtcgcctccccagttccttgattaccaatttgaaattcaatactggaatcattattttttattagccactcgccacccttttcaacgacaacctggccattactgcccgcctgatagcctaaaatggcgacgatactactcgtgacgtaacccttatccgtaatatttaaactacctgtgccatagctacctatttcgaataattcggtcgtcagaacagagtcctctccctcaacattgaccgtcccgacgcctcctgtgctagaacctaatcttaaatagcctccatcgacgtgacccttctgtttaatattcagcgtccccgttccggattgacccacatttaaaggccttgcattatttccgctatcatacaatcgccaggtgccacccaaaacattaacggtgccctcactgtcctcattagcgccaatgacgctggtagtaatagtggttaaggaggcattaccgccagccaaaatattaagcactccagtgccataccagccaaccaggtaggcatcataagcaacatcagtatcaatattggtaatctgatcattatcaacttccagacttgcaccagacgcactaccgcttagtgccagcaaaacacccagcgtcaatctactgaatttcgttgtcagtccagaggatttacgcaaattaaccgtgcttgttttacctgccctgcgagttaattcgctgcaggcctgaaatacctgtagagtgcaattccatatcacgcgatagattctattcatataaacgctccatatacaaacaatacagccacgaaagagatgagtcgtcagacattaaaaatgaaacttattaaattgtcagaggtctgtattgagtgttagttggaggtgggaaggtgtcaatttggctaatttgctaatgctttcgaattgatagattaaaaattgcatagttcttattttatttaaatatgaactatgagttattgttgcttaataagaaaactgtttctttcaataggaaaattatcatcatcatatttaacaaagaatagcactaattgctaaaaatcgaagtttattaaaccccttttgcatccattagtgtctttaggaatattcgctataaaataagggttgtgcttaatgctttaagaaaaatagcaattttcccttgaatatcgtactggtgatggaacgatgaatctgcaagctggcttttaacaagccagctctaaaagaagggaaataagaataactatactcaaaaactaacagccacggtcatcatgatgtggctgtcaatgaaattataacccaggcgctttccataagctcgtcgtcagtccatgatcaaccagccccagctgatcctgataaactgcctgccacttatcgcgactatcctgataaagttcatgcttttccgggtctggtgtgtgcgtccgttcccagcgaaccaggcgttctccggtttctgccatactactaaaaattccggcaccgacgccagctgcaatggcacatcctaatgcagtggcttctttgaccaccggaatattgacgggtaatccgctgacatcagcgagaatttgactccataatttccctttactacctccgcctgcaaagactaagctactaggatgaatattgctgaaatcagcaatttgctgcaagttacacgcacttacaatcgccgcattttcttccagcgcacggaacaatgtcgctttgttacatttatccgggtcaatggacaagttaataaaggaaggcgcagcgtgataccaggttttaaagcgcattctgtcggagaagatcggcattacgccccagctcccaggcggcacccgactggccatctcttccagcagcgtataggtgtcgatgcctaaacgttcggcaatcagtttttcttcggcacagaaagcatcgcggaaccagcgcatggtgagtccggtaaaaaagcttatagattcagcttgtaccatgccaggaataacatgaggattaacgcgcacgttcatttctgggtctgtcaccggcgcggctaaatttacaacttgctgccagaatgtgccgccaagaaccgcggtttgtgccggacgcacaacgcctaacccaaggcaaccaagctgcacgtcgcctcctccaacgaccaccggagtgcccgccttcagaccgcagagttccgccgcttgactacttaccacgcccagcaatgtgccggtttctttgacaggagaaagaatatcggcacgtaggccagccatatccagcaatgcaggtttccagtcacgggtggttagatcaagaagtcccgtggtgccagcgttagagggatccaccgccagttcgccgctgagcatataggccagccagtcgctgatcatggtgatggtacttgcctgacggtaaatatcggaacgatggtgcgccagccaaagtaatctggggatggcacttaaagccagtgtttgtccggtcgcgcgataaacttcgttttcaaaggtattgttgtgcagttctttaagttcgctaacttcgcgtgccgctctggcatccacattggcgcaggcccagatcggggctccttcattattatataaaacaatgccttcacgcatgctacatgcgctaacggcagcgatatactccggggctatgccggcgttgtgcagcgcctggcgcatacactcacacgccagttgccagtttttgttgagatcaaattccatagaaccaggaacgtccggtactgccagatgccgccactccgcctgtcccactgctatttgattgccttccaggtcgaatatcacagcccgaatacttccggtgcctgcatccagcgccatcaggtagtacttactttcactaagggtaaagagtcgagccattagattatcctcggcttatgcgttctgtctgttcctctatacgttctccatcattcccggtaataaggtcatgcaaatttaactacgtaaaatcgccgctgctgtgtcctgatcggtaaccagtgcgttgatataaccgcctttcattgcagcggcaattgcttcggctttattttctccccctgccacgccaacccggacgggtatggtcttcagcgcgcttaaaggtaagccaatcagttcgttatgtattttgatattcgtgacaacgtcaccttttgcatcaaaaaagtagcctaaaatgtcgccaaccgccccttttcggccaatcattaactgttcgccctggctgatataaccggagcgaatgattgtcgcatcgtcctgttgactcacagcaccaatgccgacaatcgccacatccgctgcttgcgcggctaacagaacatctttgacgcaattttcattttttagcgtacgggcaatgtcagcggaggatgcccgcaacggagccggaataatattcacactgcacgccgcgttaagctgcccgattcccgtcatataagaaccgacgccaccggagagcgtgaccaggcgaatttgctgactgctaataaaaccacttaagcgttgcagcgtattcatggttgcctcgccaaaaccaatcgccagcatctgttgtggttgaagtaaactcatcaacatatgcgccgcgcctatccccagtcgcccaccgacatcagcatccgcaagcccagggatcacccggacatgttgcaggctaaactgacgacgtaattgagtttcatattccagacagccttcaaagcgagaattaatctgtacgcgaataatgccggactgatgccctttctccagcaatcggctcactttcaaacgtgtcaggccgagacgatcgctgatctcgctctgggtcagcccgtcgtgatagtaaaaccacgcgatccgcgcgacctgttcttcttcacacattccctgttcactaattgcgctatcgttgattgtcataattcattcttcactttgaacatatttaaatctttaatgcaattgttcagttcttgctcatttatatctgtgatggcaaccacagtttgactctacgagcatgaacaaacgcaaccgtgaaaatcaaaatagcataaattgtgatctattcgtcggaaatatgtgcaatgtccacctaaggttatgaacaaattaaaagcagaaatacatttgttcaaaactcacctgcaaaactgaacgggggaaatatgcaaacgagtgatacccgcgcgttaccgctactttgcgcccgcagcgtttataaacagtatagtggggtcaatgtcctgaaaggcatcgattttacgttgcatcagggggaggtccacgccctgctcggcggcaatggtgccggtaaaagcacgttaatgaagattattgccggtattacccctgctgatagcggtacgctggagattgagggcaacaactacgtcagattaacgccagttcatgctcatcagctgggtatttatctcgttccccaggaaccgctgcttttcccaagcctgagcataaaagaaaacatcctgtttgggctggcaaaaaaacagctctccatgcagaaaatgaagaacttgctggcggcgctgggctgccagtttgatctgcatagtctggcaggaagcctggatgtcgccgatcgccaaatggtggaaatcctccgcgggctgatgcgcgacagccggattctgatcctcgatgaacctaccgccagccttacccctgcggaaaccgaacgcttgtttagtcgcttgcaagagctgcttgctactggcgtgggtattgtttttatcagccataagctgccggaaattcgccagattgccgatcgaattagcgtgatgcgcgacggaaccatcgccttaagcggcaaaaccagcgaactgtctaccgacgacattattcaggccatcaccccagcggtacgggaaaaaagcctctctgccagccaaaaattatggctggagttacctggtaaccgcccacaacatgccgccggaacgccggtgctgacactggaaaatctgaccggcgaaggtttcaggaatgtcagcctgacgctcaatgccggagaaattctgggcctggctgggctggtgggggccggacgcacagaactggccgagacgctctatggtctgcgtactttgcgtggcggacgcattatgctgaatggtaaagagatcaataaattatccactggagaacgtttactgcgcggtctggtttatctgccggaagatcgccagagttccggactgaatctcgatgctagcctggcctggaacgtctgcgcccttactcataaccttcgtggattctgggcgaaaaccgcgaaagataatgccaccctggaacgttatcgtcgggcgctgaatattaaattcaaccaaccggaacaagctgcacggacattatccggtggcaaccagcaaaaaatcctcattgccaaatgcttggaagctagcccgcaagtattgattgtcgatgagccgacgcgcggcgtggatgtcagcgcccgtaatgatatctaccagctgttgcgcagcatcgccgcacaaaatgtggctgtgctgcttatctcctccgacctggaagagatcgaactgatggcagatcgtgtgtatgtgatgcatcagggcgaaattacccactctgcactgaccgagcgcgatattaatgtcgagactattatgcgcgttgccttcggcgatagtcagcgtcaggaggcgagttgctgagctaaagtcagcgtcaggaggcgtcatgctgaagtttattcagaacaaccgtgaaatcacggcactgctggcggtggtgctgctgtttgtattacccggttttctcgaccgccagtatttaagtgtgcaaacgctgaccatggtttatagcagcgcgcaaatcctgatcctgctggcaatgggcgcgacgctggtaatgcttacgcgcaatattgatgttagtgtgggtagcattaccggaatgtgcgcggtgctgttggggatgttactgaacgcaggatatagtctacctgttgcttgtgtcgcgactttactgcttggtttgctcgcgggatttttcaacggtgtcctggtcgcgtggctaaagatccctgccattgttgccacccttggcacgttagggttgtacagaggcatcatgttgctgtggactggcggcaaatggattgaagggttacccgccgaactgaaacagctctccgccccgctgctgcttggcgttagtgcaattggttggttgacgataattctggtggcatttatggcctggctgctggcaaagacggcgtttggacgcagtttttatgccacgggcgataatttacagggcgctcgtcaactgggcgttcgtactgaagccattcgcattgtggcatttagcttgaacggctgcatggcggcactggcgggaattgtgtttgctagccagattggttttatccccaaccagaccggtaccgggctggagatgaaagcaattgcagcctgcgtgctgggcggcattagtttgctcggtggttccggtgcgatcattggtgcggtactcggcgcatggttcctgacgcagatcgatagcgtactggtgctgttgcgcattccggcatggtggaatgattttatcgcgggtctggttctgctggcggtgctggtgtttgatggacgcctgcgttgtgcgctggaacgtaatctacggcggcaaaaatatgcccgctttatgacgccaccgccatccgttaaacccgctagcagtggtaaaaaacgggaggccgcataatgcgtattcgctacggttgggaactggctcttgccgcactgctcgttattgagattgtcgcatttggtgcaattaacccgcgaatgttagatctcaatatgttgctgttcagcaccagtgactttatctgcattggcattgtcgccctaccgctaacgatggtgattgtcagtggcgggatcgatattagctttggtagcaccatcggcctctgcgccattgcattgggcgtactgtttcaaagtggtgtgccgatgccgctggcgatactcctgaccttactgctcggcgcattgtgcgggctgatcaacgccggattaattatctataccaaagttaacccgctggtgattacgcttggcacgctgtatctgtttgccggaagcgctctgctgctttccggtatggccggagcgacggggtacgaaggtattggtggattcccgatggcgtttacagatttcgctaacctggatgtgctgggactccccgttccgctgattatcttcctgatatgtctcctcgttttctggctctggctgcataaaacccatgccggacgtaatgtgtttttgattgggcaaagcccgcgcgtggcgctttatagcgcgattccagttaaccgtaccttatgtgcgctctatgccatgacggggctggcgtctgcggtcgccgctgtgctgctggtaagctattttggtagtgcacgttccgatctcggtgcgagctttctgatgcccgccatcaccgccgtggtgcttggcggggccaatatttatggtggttccggttccattatcggcaccgccattgcggttttattagtgggatatttgcaacaaggtttgcaaatggcaggagtgccaaatcaggtgtccagcgccctttccggtgcgctacttatcgtcgttgtcgtaggtcgttccgttagcctgcatcgccagcaaattaaagagtggctggcgcgtcgggccaataacccattgccataaaggatatcttcatgacacttcatcgctttaagaaaatcgccttacttagcgctcttggcattgccgcaatctctatgaatgtgcaggccgcagagcgtattgcatttattcccaaactggttggcgtgggattttttaccagcggtggcaacggcgcacaacaagcgggtaaagagctgggcgttgatgtgacctacgacgggccgacagaacccagtgtttctggtcaggtacagttgattaataacttcgtcaatcaaggttataacgccattatcgtttctgcggttagccctgatggcttgtgtccggcactgaaacgcgccatgcaacgtggtgtgagagtgctgacctgggactctgatactaaaccggagtgccgctcttactacattaatcagggaacgcccgcccagttaggaggtatgttggtggatatggcggcgcgtcaggtgaataaagacaaagccaaagtcgcgtttttctacagtagccccaccgttacggaccaaaaccagtgggtgaaagaagcgaaagcgaaaatcgccaaagagcatccaggctgggaaattgtcactacgcagtttggctataacgatgccactaaaagcttacaaaccgcagaaggaatattaaaagcgtatagcgatctcgacgccattatcgcccccgatgccaacgccctgcccgctgccgcacaagccgcagaaaacttgaaaaatgacaaagtagcgattgtcggattcagtacgccaaatgtgatgcgcccgtatgtagagcgcggcacggtgaaagaatttggcctgtgggatgtggttcagcaaggcaaaattagtgtgtatgtcgcggatgcattattgaaaaaaggaagtatgaaaacgggcgacaagctggatatcaagggcgtaggtcaggttgaagtcagcccaaacagcgttcagggctatgactacgaagcggatggtaatggcatcgtactgttaccggagcgcgtgatattcaacaaagagaatatcggcaaatacgatttctgatgtgcattacttaaccggagtaagttatggcagatttagacgatattaaagatggtaaagattttcgtaccgatcaaccgcaaaaaaatatcccttttaccctgaaaggttgcggtgcgctggattggggaatgcagagtcgcttaagccggatatttaatccgaaaacgggtaaaaccgtgatgctggcttttgaccatggttattttcagggaccgactaccggacttgaacgcattgatataaatatcgccccgctgtttgaacatgccgatgtattaatgtgtacgcgcggcattttgcgcagcgtagttccccctgcgaccaataggccggtggtactgcgggcgagtggtgcgaactctattctggcggaattaagtaatgaagccgtggcgttaagcatggatgacgccgtgcgcctgaacagttgcgcggtggcggcgcaggtttatatcggcagcgaatatgaacatcagagcatcaaaaatattattcagctggttgatgccggaatgaaagtgggaatgccgaccatggccgtgactggcgtgggcaaagatatggtgcgcgatcagcgttatttcagcctcgcgactcgaatcgccgctgaaatgggggcgcaaattatcaaaacctattatgtcgaaaaaggttttgaacggattgttgccggatgtccggtacccattgttattgctggcggtaaaaaattaccggagcgcgaggcgctggaaatgtgctggcaggctatcgatcagggcgcttctggtgtggatatggggcgtaatattttccagtctgaccatccggtggcgatgatgaaagccgtacaggcggtggttcaccataacgaaacggctgatcgggcatatgaactctatctgagtgaaaaacagtaactgcggatctaaggagaagaattatgcacgtcacactggttgaaattaacgttcatgaagacaaggttgacgagtttatcgaagtttttcgccagaaccacctgggctctgtacaggaagaaggcaatttgcgcttcgatgtcttacaggacccggaagtgaatagccgcttttatatctacgaagcctataaagatgaagacgcagtggcgttccataaaaccacgccccactacaaaacctgtgtcgcgaaactggaatctttaatgaccgggccgcgtaaaaaacgtctgttcaatggtttgatgccgtgaggcgaatttatcaattttatctacaattggggtaacgcgctgacgggagtaaaaaaatgtctgactggaacccctctttatatctacacttttccgctgaacgaagccgtccggcggtggagctgcttgccagagtgccgctggaaaatgtcgaatatgttgccgatcttggctgtggcccaggtaacagcaccgcccttctacaacaacgttggcctgcggccaggataacaggcatcgacagctctccggcgatgattgctgaagcgcgcagtgctttgccagactgccagttcgtggaagcagacatccgcaactggcaaccggtacaggcactcgatctgatttttgctaatgccagtctgcaatggctgcccgaccactacgaattgtttcctcatctggtttctttacttaatccgcagggcgtgctggcagtacagatgccagataactggctggagccgacccatgtgctcatgcgcgaagttgcctgggaacaaaactacccggatcgcgggcgtgagccgttggctggcgttcatgcttactacgatattttgagcgaagccggatgtgaggtcgatatctggcgaaccacctactatcaccagatgccgagtcaccaggcgattatcgattgggtgactgccactggattacgtccgtggttacaggatctgaccgagagcgaacagcagctttttcttaagcgctaccatcagatgctggaagagcagtatccactgcaagagaacggacagatactgctggcatttccgcgtctgtttattgttgcccggcgtatggagtaaatatcacgtcagctggtaatgacgatcgggaagaatttttgctggaatttcggcttcatcgttcatctgtaacaggtcaatttcaatagcgttgcagatggcatccagtggtaaatcattgttttcagtaccgaacggatcttccagttcttccgccagacaatccaggctaataaaagtgtaggaaatcagcacagagataaaaggcgtcatgtaatgcaggtccacgaccagcgcgaacggcagcatgatacaaaacagataaacggtacgatgcaaaatcagggtgtaggcaaagggaattggcgtataggcaatgcgctcgcatcctgccaggaccgcactaatatcattaagccgatcgttgaggctaataaacaggatatcactaagctgtccattgcggcgctgaaccgccaaccattctcccattattaacaagatacggttagctggagagttgctagccagtacacgctgaagatcttcagtcttgagataatgagccagcacttccgcctgtggctgtttgcgtaatgtcatgcgtaaacagtgggcgaaagcgatttgcagccgggcaaactcccttacacttgcgctatccggcaatgtcgtttttacctcgcgcagtaagctccgactggcaatcatcaactgcccccaaagttttcgcgcttcaacgtaacgggcgtacccggcattattacgaaaaccaagaaaaatggcgatggcgacaccgagaatgctgaacggtgcgagggtgaatttgatgcccagatgcgtgtaccagggcagcatgaaaataacagcgatagaaaagagaaaattgagtagtaagcggctggatatcttggataatacactgccgtgccagacaaaaatacggcgcagccagtgttgttgtggacgaacaatcatggttatcttcaggcgtggaaaagtcgccctattaaacgtgattacgatcacattctcaagacgctacttacaaattacctacaagcttacaacattagcaggcgctgcatgtggcacctgttaatgataaaggcatataggatgttgtaactaatatggtgaaataagaaacccggtcgaaaccgggttcagaagtaacggtgttattagcacaacggacgtacagcttcgcgcatccctttttcgagaatcgcatccaggtcattagcaacctgctcgaccagaccaggcacttgcgtcaggtcctgctcccagtggtctttttctgccaaaacaatcgctaccagttcctgggtgccgataacacggtcacgatgctggctccagagttgctgataacgttccagccagtgtgcatcgtcctgtaccggatatgtttcgccgttacgctcaccacgatagaacgcaatcaatgccgctaatgcgaaagtaaggcgcgccggaagtgtgccgtttgccttctgccctgccagcagctgtggcaggatgcgggtgcggaacttggtcataccgttgagcgcgatagacagcagctgatgcttaatgtacgggttacggaaacgcccggtgactgcactggcgaaagattccagttcatcacgaggcaaatccagtaccggaataatttcttcgtagatagctttttcaacgaatgcgcaaatttcagcatcgttcatcgcttcacctacggtatccagccctgcctggaacgccaccggcaccagcgcggtgtgcgcaccgttgaggattgccactttgcgttctttgtacggtttaatatcgtcaacaatcagcacgttgagcggatatttgtccagacgcagttcagtcgctaaggatttcggtccctgaatcacaaacaggtaaaagtgttcagcggtgtcgagaaaaccatcgtgataacccagttcttcttccagtttagccacttcatcgcgcggataaccggtaacgatacggtccaccagcgtagaacagaagctgttagcctgatccagccattgaataaatgcttctggcagtgcccactcttgcgcatagcgcagcaccagttcacgcaacgcgtcgccattgtagtcaatcaactcacacggaatgatgatccaacctttatccagcgcaccgttgaaatggctaaagcgttcgaacagcagacgggtcagttttgccggatagcttaccgctggcgcgtcatcgaatttatcgcccgcatggtagctgatacccgcttcggtggtgttagagaaaacaaagcgcatttccgggttgtgcgccagtttcaggaattcatcgtattcactgtagacgctgatttcacgattaacgctgcgaatcagacgcgcgtcgctgaccgcttcccccttctcattcaggccacggataatggtggtgtacagaccatcctgcgtgctcagactcggcgggaaactagtttcaatcggacgaacaacgaccacgccagaattcagatcggtgtgctcattcaggagatcgatttgccagtcaacaaaggcgcgcaggaagttaccttcaccaaactgaatgatacgttctggatactgtgcaccgggaaaatcgcgacgatttagtgttttcacaatgggttcccttctgattagtcatacaacctgtttgaattggtacgacaggttagcaaactttaatacgccgaacccctgttttgatcaactcctgatgattaatgagcagttttatgagaaaagtgtggcgcggatcatggtttaatcgaggaaaaacgccttttcctggatcataaagtggtagaacacattgcattcaaatcgcgcgtaatgaataaagatgtcagacaacttcctcaccgtaacgcatagtgctggtacggttgcgcccatctttcttgctgcgatacagacacgtatcggcttcgaccatcaatttattaaagtcatcggtcagcgttaggtagcttgcgcgaccactaccgacgccaatacttaccgtgagataaagcgttttttgttgccaggtgaatggttgcagttcaacgcctttacggattttttccgccattagcagaccatcgacaggattcacgctcggcactgcaacagcaaattcttcgccgcccattcgcgccaccagccccttatcaccgacaatcttctgaatatgccgggcaaacacgcttaacactttatcgccacattcatgtccatagttatcgttaatgcttttgaaatagtcgatatcaagcagcatgacagtcagatgttgtgtctgtttcaggcttggacttttcagcgcctcataaagaccggaccgactgtaaacctgagtcagaaaatcaaagtcggctcgcagcgcaacttgcttcattaggctattgatcgctgccacgctaaaagaaaccataattgggcatatcgccatcgtggcaataccgagacgtgcggagaacatttgcggaatggagaacgggctaccgacgctgatatcaatcacgctatttgccaccagtacgatttccaccgcaccggtgacaaaggtcaacagacatgttacctgcggcgtatagcgcactgcacaccagattaatgcaggcagcgggaacgccagactccccgctccgccaatgactacgctggcaataacgctcacaataagcgcgatggcgggcatcatctgttctgctttaaagcgcggcagcactccaggaatagccaacgtcagcatacaaggcacgatcaacacgcccgtactgaattgctcactgaaccagtccgcaagcaaaggccagaaatccagactatcaatactgaccgaaccaagatagcatgttcgctgacagcggcggcaaataaaggtaccctgggaatgctattttgtcgttttccgcaattctcatggctgattcatctgtacaaccagccagtgatagattaccgccacgatataacgttgttgttcttcgcttaagctaacaccctgcggaatgttatgccacttagccagacaaccgcgacagcaggtcgcggtggcgtgctgagcgataaacaccggatgcccgcgcatgggggtttgcttaccgtcattagccggtaatgccggagcaagacgtttagcgacaaaatccgccgcatgttgttcgatgactggcgcgcctttctccaggcaatactgacgctctttcatgcccagacgaaagcgagagcgaaatttactacgggataaacgcgcgaagagtggatcgagagactgcattaataaacgctacgccctaactgtttcgtcaattgttcaagaacggcaatacccgcaaggctgttacctgcatcatccagttccggactccagacagcgatggccatttcatgcggaacaatcgccacaataccgccaccaacgccagatttcgccggtagccccacccgccaggcaaactcccccgcgttctggtacataccactggtcgccatcagcgcgttaatttgccgcgcctgcattggcgtcaccactggttcatcaatatgaatagctttcccctgattagccagaaagacaaacgtccgggccagctctacacagctcattttcagagcgcagtaatgaaagtagttttgcagaacggttgtcacgtcatgatggaaattgccaaagctcttcatcagccaggcgatagccgcatttcgcgcggaatgttcaaattcggaacgcgctaccaccgtatcgtaggaaatatcagacacaccgcttaagccgcgcacgacttccagcatacgttgccgtggtgcgcttaatcgcccttgcaacatatcgcagaccaccagcgcaccggcattaatgaacggattacgcggtataccctgctccatttccagttgcactaaggaattgaacggacttccagacggatctttgccgacgcgttgccagatttcctcttcggagtaatgacgcatggcgacaacgagactcagcactttggaaatagactgaatggaaaaacgttcttgcgcgtctccggcctgaaaaagctgtccgtcaacggtacagatagcaatccccaatcgggaaccgtctactgtagccagcgccggaatataatccgcgactttaccctgaccaatgagcggccgcacttgccgcaagatgttttctaaaattgcattatccatggcgactgccactttctactcctggaccgcaggtctgaaaagacctgcgagtatatcagagctgaatatgtcgcgtcagatccggtctttccacaccgtctggatattacagaattcgtgtaagccgaaatgggaaagctcacgaccaaagccactctttttcacgccaccaaaggccactcgcgcgtcgctggcacaataaccattgataaacaccccaccgcattccagacgtgccgccatctgtctggcctgtgtttcgtcagtggtaaaaatggtcgcactaaggccgaactcactatcattagccagttccagtgcatgttctgcatctttcgcaatggtgattgccgcaacggggccaaacatttcttcccgaaacgcggtcatttctggggtaacattcgccagaaccgttggcggatagtagttacctgccccagccatcttttccccgcccagtaacaaacgcgcaccctgcgccagggttttctccacctgatgatgcagctcatcacgtaaatcaaaacgagccattggtccgagagcgttctcttcgtcacggggatcgcccattttcaaggctgccgcagctgccacaaaacgttcggtaaatgcgctagcaattccctcttcgataataaagcgttttgccgctgcacatacctgtccggtattctgataacgtccggctaccgccgctttcaccgccagttccagatcggcatcgttaagcacaataaacggatcgctaccgcccagttccagtacgcattttttcagtgccgctccagcctgtgcgccaatagccgctcccgcacgaacacttccggtcaccgtgacagcagcaatgcggctgtctttaatcatctgactgacaccgtcgttgtcggcattcagccagccatatacgccttgtgggatacccgcatctttaaacacctgggcaatgagctgtgcacagcccatcacattcggcgtatgtttaagtaagtagccgttacctgcaagaatgatgggaacagcgccacgcatcacctgccataacggaaaattccacggcataatcgccagaatcgtccccaacggtcgatactcaataaccgcctgctgattttccaccagcgtaggttccgccttcagcattgccggaccatgttctgcataccagtcacacaaattcgcgcttttcgccacttcagcgcgcgcctggttgattggtttgcccatttcgcgggtgatcatttgcgccatttcttcgctacgagcgcgcagagccttaccgatatcacgcagtttttcagcacgataatctatatttgtctcgcgccagtcgcgaaagcctgctgccgccagctgaagtgcgttttcgatatcgtcagcgccagcccacggcagcacagaaagttgttcacccgtggcaggatttatgctaattgcatgagttgccggagtaatggtcatcggggtatctcctttatgagtcatggtatgaagatacgcagatttactcttgctttaaaatgaataatattaagccacttattcacgaatcgagaatgctatggatctgacccaactggagatgttcaacgcggttgccgaagctggcagcataacccaggctgcagcaaaagtgcatcgcgtgccgagcaatctcactacccgtctgcgccagctggaaacagaactgggggttgatctgtttattcgcgagaatcagcgtttacgtctctctcctgccgggcataactttttacgctatagccaacaaattctcgcgttagtggatgaagcgcggagcgttgtcgctggcgatgagccgcaaggtttattttctcttggtagcctggaaagcaccgctgcagtgcgcattccagccacgctggcggaattcaaccgtcgttatcccaaaattcagtttagtctttccaccggcccttccggcactatgctggatggtgtactggagggaaaactgaatgcggcgtttattgatggacccattaaccatactgccatcgacgggataccggtataccgcgaggaactgatgatcgtcacgccacaaggatatgcgccagtaacccgtgccagtcaggttaatggcagtaacatttatgccttccgcgccaattgtagctatcgtcgccacttcgagagctggtttcatgctgacggtgccgctccgggaactatccatgagatggagtcttatcacggaatgttggcctgtgtgatcgcaggagcaggcattgcgcttattccgcgctctatgctggaaagtatgccggggcatcaccaggttgaagcgtggccgttagctgagcaatggcgttggttaacaacctggctggtctggcgtcgtggtgcgaaaacacgtccgctcgaggcatttattcaactgctggatgtgcctgacagcgcaagacagggatatcaatgagctatttttgatagttcttgcggttaatatgctctatatagtgatgttccgatgacttatgactatatggggcaaatatggttacgccagtaagcatcagcaattacatatctcttcctgatgattttcccgtacgtaatattgcaccgcaggtaaaagaagttttaaaggattttattgatgcacttagtacaataatatgtaatgaagagtggcgcacgtctttaaacatcaacagtgccacaaaaaagatatttaataaccttgacaacttaagttatattcagaggacttcttttcggggtaacgacacgctatacaatgaaaaggttcagtttaaactcacttatcccgccaggaatggaagacacaaagaaaatattgaatttcaggtagtaataaatttaagccctatttatttagataattttcgccatgatggagaaattaatattttttgcgctcccaacccaaagcctgtcactatggggcgcgtatttcagaccggcgtcgagcgtgtactctttctgtttctgaatgattttattgaacaatttccaatgatcaaccctggtgttcccatcaaaagagcgcatacaccacatattgaacccctgcctagcgatcaccataccgctgcagattacttacgccagtttgatttgcttgtcctgaattttatctctcgcggtaattttgtcatactcccccgattatggagtaactctgaggttcacagatggttcgtcaataaagatcctaacttgatcaccgccattctcgacataacggacagcgaattaaaagaggatttgttgcaaagcctgatggatagtttaggttctaacaaacatgtactacccgaagtctgcatctgctttttatcccttttagcagaacaagaatctcctcattttcagaacttgtttttatttttcgccaatatgttattgcactatcaccaatttatgaatcccaatgaaagtgatttgaatgacgtgttgatgccagcaagtttaagtgatgataaaattatcaaacatatggcgcgcaggaccctcaaactgtttgtaaaaaatgaaacaccgccaaaagttactcacgaagacctggtgaaaaacaggcctcgctcccctgtcagaccacctatacccgcaaccgccaaaacgccagacctccctgaacgtcattaaaccgtgatgttaccgactctctgacgcgtgaaagaatcagcgtcagagaaacggaaaacgcgatccagatcacaaatgcattgtattcacatcattaaccgttttaagatcatttcatcactttttcgcaactcacccgataatctgttatgacaacaaacactgtttcccgcaaagtggcgtggctacgggtcgttacgctggcagtcgccgccttcatcttcaacaccaccgaatttgtccctgttggcctgctctctgacattgcgcaaagttttcacatgcaaaccgctcaggtcggcatcatgttgaccatttacgcatgggtagtagcgctaatgagtttgccttttatgttaatgaccagtcaggttgaacggcgcaaattactgatctgcctgtttgtggtgtttattgccagccacgtactgagctttttgagctggagctttaccgttctggtgatcagtcgcattggtgtggcttttgcacatgcgattttctggagcattacggcgtctctggcgatccgtatggctccggccgggaagcgagcacaggcattgagtttaattgccaccggtacagcactggcgatggtcttaggtttacctctcgggcgcattgtgggccagtatttcggttggcgaatgaccttcttcgcgattggtattggggcgcttatcacccttttgtgcctgattaagttacttcccttactgcccagtgagcattccggtagtctgaaaagcctcccgctattgttccgccgcccggcattgatgagcatttatttgttaactgtggtggttgtcaccgcccattacacggcatacagctatatcgagccttttgtacaaaacattgcgggattcagcgccaactttgccacggcattactgttattactcggtggtgcgggcattattggcagcgtgattttcggtaaactgggtaatcagtatgcgtctgcgttggtgagtacggcgattgcgctgttgctggtgtgcctggcattgctgttacctgcggcgaacagtgaaatacacctcggggtgctgagtattttctgggggatcgcgatgatgatcatcgggcttggtatgcaggttaaagtgctggcgctggcaccagatgctaccgacgtcgcgatggcgctattctccggcatatttaatattggaatcggggcgggtgcgttggtaggtaatcaggtgagtttgcactggagtatgagcatgattggttatgtgggcgcggtgcctgcttttgccgcgttaatttggagtatcattatatttcgccgctggccagtgacactcgaagaacagacgcaataattgaaaggcccattcgggccttttttaatggtacgttttaatgatttccaggatgccgttaataataaactgcacacccatacataccagcaggaatcccatcagacgggagatcgcttcaatgccacccttgcccaccagccgcataattgcgccggagctgcgtaggcttccccacaaaataaccgccaccaggaaaaagatcagcggcggcgcaaccatcagtacccaatcagcgaaggtactactctgacgcactgtggacgcgctgctaataatcatcgctatggttcccggaccggcagtacttggcattgccagcggcacaaaggcaatattggcactgggttcatcttccagctcttcgctcttgcttttcgcctccggactatcaatcgctttctgttgcggaaagagcatccgaaaaccgataaacgcgacgattaagccgcctgcaattcgcagaccgggaatgctaatgccaaatgtatccatcaccagttgcccggcgtaatacgccaccatcatgatggcaaatacgtacacgctggccatcaagctctgacgattacgttcggcactgttcatgttgcctgccaggccaagaaataacgcgacagttgttaatgggttagctaacggcagcaacaccaccagccccaggccaattgctttaaacaaatctaacattggtggttgttatcctgtgtatctgggttatcagcgaaaagtataaggggtaaacaaggataaagtgtcactctttagctagccttgcatcgcattgaacaaaacttgaaccgatttagcaaaacgtggcatcggtcaattcattcatttgacttatacttgcctgggcaatattatcccctgcaactaattacttgccagggcaactaatgtgaaaagtaccagcgatctgttcaatgaaattattccattgggtcgcttaatccatatggttaatcagaagaaagatcgcctgcttaacgagtatctgtctccgctggatattaccgcggcacagtttaaggtgctctgctctatccgctgcgcggcgtgtattactccggttgaactgaaaaaggtattgagcgtcgacctgggagcactgacccgtatgctggatcgcctggtctgtaaaggctgggtggaaaggttgccgaacccgaatgacaagcgcggcgtactggtaaaacttaccaccggcggcgcggcaatatgtgaacaatgccatcaattagttggccaggacctgcaccaagaattaacaaaaaacctgacggcggacgaagtggcaacacttgagtatttgcttaagaaagtcctgccgtaaacaaaaaagaggtatgacgatgtccagacgcaatactgacgctattaccattcatagcattttggactggatcgaggacaacctggaaagcccactgagtctggagaaagtgagtgagcgtagcggttactccaaatggcacctgcaacggatgtttaaaaaagaaaccggtcatagtttaggccaatacatccgcagccgtaagatgacggaaatcgcgcaaaagctgaaggaaagtaacgagccgatactctatctggcagaacgatatggcttcgagagccaacaaactctgacccgaaccttcaaaaattactttgatgttccgccgcataaataccggatgaccaatatgcagggcgaaagccgctttttacatccattaaatcattacaacagctaattgaaaacgtgacaacgtcactgaggcaatcatgaaaccacttagttccgcaatagcagctgcgcttattctcttttccgcgcagggcgttgcggaacaaaccacgcagccagttgttacttcttgtgccaatgtcgtggttgttcccccaagccaggaacacccaccgtttgatttaaatcacatgggtactggcagtgataagagcgatgcgctcggcgtgccctattataatcaacacgctatgtaatttgttctggccccgacatctcggggcttattaacttcccacctttaccgctttacgccaccgcaagccaaatacattgatatacagcccggtcataatgagcaccgcacctaaaaattgcagacccgttaagcgttcatccaacaatagtgccgcacttgccagtcctactacgggcaccagtaagcttaacggtgcaacccgccaggtttcatagcgtcccagtaacgtcccccagatcccataaccaacaattgtcgccacaaacgccagatacatcagagacaagatggtggtcatatcgatagtaaccagactgtgaatcatggttgcggaaccatcgagaatcaggctggcaacaaagaagggaatgattgggattaaagcgctccagattaccaggctcatcaccgccggacgcgtactgtggctcatgatctttttattgaagatgttgccacacgcccaactaaatgctgccgccagggtcaacataaagccgagcatcgccacatgctgaccgttcagactatcttcgattaacaccagtacgccaaaaatcgctaaggcgatccccgccaattgtttgccatgcagtcgctccccgaaagtaaacgcgccaagcatgatagtaaaaaacgcctgtgcctgtaacaccaggctagccagtccagcaggcataccgaagttaatggcacaaaaaagaaaagcaaactgcgcaaaactgatggttaatccataccccagcagcaaattcagtggtactttcggtcgtgcgacaaaaaagatagccggaaaagcgaccagcataaagcgcaaaccggccagcatcagcggtggcatgttatgaagccccactttgatgaccacaaaatttagcccccatacgaccactaccagtagcgccaacaccccatcttttcggctcattctaccgcctctgaatttcatcttttgtaagcaatcaacttagctgaatttacttttctttaacagttgattcgttagtcgccggttacgacggcattaatgcgcaaataagtcgctatacttcggatttttgccatgctatttctttacatctctaaaacaaaacataacgaaacgcactgccggacagacaaatgaacttatccctacgacgctctaccagcgcccttcttgccagcagcttgttattaaccatcggacgcggcgctacgctgccatttatgaccatttacttgagtcgccagtacagcctgagtgtcgatctaatcggttatgcgatgacaattgcgctcactattggcgtcgtttttagcctcggttttggtatcctggcggataagttcgacaagaaacgctatatgttactggcaattaccgccttcgccagcggttttattgccattactttagtgaataacgtgacgctggttgtgctcttttttgccctcattaactgcgcctattctgtttttgctaccgtgctgaaagcctggtttgccgacaatcttagctccaccagcaaaacgaaaatcttcagtatcaactacaccatgctaaacattggctggaccatcggtccgccgctcggcacgctgttggtaatgcagagcatcaatctgcccttctggctggcagctatctgttccgcgtttcccatgcttttcattcaaatttgggtaaagcgcagcgagaaaatcatcgccacggaaacaggcagtgtctggagcccgaaagttttattacaagataaagcactgttgtggtttacctgctctggttttctggcttcttttgtaagcggcgcatttgctagttgcattagtcaatatgtgatggtgattgctgatggggattttgccgaaaaggtggtcgcggttgttcttccggtgaatgctgccatggtggttacgttgcaatattccgtgggccgccgacttaacccggctaacatccgcgcgctgatgacagcaggcaccctctgtttcgtcatcggtctggtcggttttattttttccggcaacagcctgctattgtggggtatgagtgctgcggtatttactgtcggtgaaatcatttatgcgccgggcgagtatatgttgattgaccatattgcgccgccagaaatgaaagccagctatttttccgcccagtctttaggctggcttggtgccgcgattaacccattagtgagtggcgtagtgctaaccagcctgccgccttccagcctgtttgtcatcttagcgttggtgatcattgctgcgtgggtgctgatgttaaaagggattcgagcaagaccgtgggggcagcccgcgctttgttgatttaagtcgaacacaataaagatttaattcagccttcgtttaggttacctctgctaatatctttctcattgagatgaaaattaaggcaagcgaggaaacacaccacaccataaacggaggcaaataatgctgggtaatatgaatgtttttatggccgtactgggaataattttattttctggttttctggccgcgtatttcagccacaaatgggatgactaatgaacggagataatccctcacctaaccggccccttgttacagttgtgtacaaggggcctgatttttatgacggcgaaaaaaaaccgccagtaaaccggcggtgaatgcttgcatggatagatttgtgttttgcttttacgctaacaggcattttcctgcactgataacgaatcgttgacacagtagcatcagttttctcaatgaatgttaaacggagcttaaactcggttaatcacattttgttcgtcaataaacatgcagcgatttcttccggtttgcttaccctcatacattgcccggtccgctcttccaatgaccacatccagaggctcttcaggaaatgcgcgactcacacctgctgtcacggtaatgttgatatgcccttcagaatgtgtgatggcatggttatcgactaactggcaaattctgacacctgcacgacatgcttcttcatcattagccgctttgacaataatgataaattcttcgcccccgtagcgataaaccgtttcgtaatcacgcgtccaactggctaagtaagttgccagggtgcgtaatactacatcgccgattaaatgcccgtaggtatcattaaccaatttaaatcggtcaatatccaacaacattaaataaagattcagaggctcagcgttgcgtaactgatgatcaaaggattcatcaagaacccgacgacccggcaatcccgtcaaaacatccatattgctacggatcgtcagcaaataaattttgtaatcggttaatgccgcagtaaaagaaagcaacccctcctgaaaggcgtcgaaatgcgcgtcctgccagtgattttcaacaatagccagcattaattcccgaccacagttatgcatatgttgatgggcagaatccattagccgaacgtaaggtaattcatcgttatcgagtggccccagatgatcaatccaccgaccaaactggcacagtccataagaatggttatccgttatttctggcttactggcatctctcgcgaccacgctgtgaaacatactcaccagccactggtagtgggcatcgatagccttattgagatttaacaagatggcatcaatttccgttgtcttcttgatcattgccactcctttttcacagttccttgtgcgcgctattctaacgagagaaaagcaaaattacgtcaatattttcatagaaatccgaagttatgagtcatctctgagataacattgtgatttaaaacaaaatcagcggataaaaaagtgtttaattctgtaaattacctctgcattatcgtaaataaaaggatgacaaatagcataacccaataccctaatggcccagtagttcaggccatcaggctaatttatttttatttctgcaaatgagtgacccgaacgacggccggcgcgcttttcttatccagactgccactaatgttgatcatctggtccggctgaacttctcgtccatcaaagacggccgcaggaataacgacattaatttcaccgctcttatcgcgaaaaacgtaacggtcctctcctttgtgagaaatcaaattaccgcgtagactaacgctagcgccatcgtgcatggtttttgcgaaatcaacggtcattttttttgcatcatcggttccgcgatagccatcttctattgcatgaggcggcggtggcgctgcatcctgttttaaaccgccctggtcatctgccaacgcataaggcatgacaagaaaacttgctaatacaatggcctgaaatttcatactaactccttaattgcgtttggtttgacttattaagtctggttgctatttttataattgccaaataagaatattgccaattgttataaggcatttaaaatcagccaactagctgtcaaatatacagagaatttaactcactaaagttaagaagattgaaaagtcttaaacatattttcagaataatcggatttatatgtttgaaaattattatattggacgagcatacagaaaaagcaaatcacctttacatataaaagcgtggacaaaaaacagtgaacattaatagagataaaattgtacaacttgtagataccgatactattgaaaacctgacatccgcgttgagtcaaagacttatcgcggatcaattacgcttaactaccgccgaaagttgcaccggcggtaagttggctagcgccctgtgtgcagctgaagatacacccaaattttacggtgcaggctttgttactttcaccgatcaggcaaagatgaaaatcctcagcgtaagccagcaatctcttgaacgatattctgcggtgagtgagaaagtggcagcagaaatggcaaccggtgccatagagcgtgcggatgctgatgtcagtattgccattaccggctacggcggaccggagggcggtgaagatggtacgccagcgggtaccgtctggtttgcgtggcatattaaaggccagaactacactgcggttatgcattttgctggcgactgcgaaacggtattagctttagcggtgaggtttgccctcgcccagctgctgcaattactgctataaccaggctggcctggcgatatctcaggccagccattggtggtgtttatatgttcaagccacgatgttgcagcatcggcataatcttaggtgccttaccgcgccattgtcgatacaggcgttccagatcttcgctgttacctctggaaaggatcgcctcgcgaaaacgcagcccattttcacgcgttaatccgccctgctcaacaaaccactgataaccatcatcggccaacatttgcgtccacagataagcgtaataacctgcagcatatccgccaccaaaaatatgggcgaaataactgctgcgatagcgtggcggtatagcaggaagatccatattttccgccaccagcgcccgcaattcaaaatcatcgacatcctgcattgcttcgttttcttccaggcaatgccagcgcatatcgagaagtgcggcgctaagcagttcgctcatctcataccctttgttgaacaggctggcattacgcattttctgttgcagttcgtcaggcattgctgccccgctctgataatgccgggcgtagcgagcgaatacctgcggatgcgttgcccagtgttcgttgatttggctcggaaattcgacaaaatcacgcggcgtgttggtgccggaaagcgtggcataacgctggcgggcaaaaaggccgtgcagcgtatgaccaaattcatggaataaggttatgacatcatcccagagtaacaacgcaggctcaccggcagcgggtttctgataattgcagacgttataaattaccggatgtgttttattaagcgtactttgctcaacaaaattgcccatccatgcaccgccgcttttactatcacgggcgaagaaatcaccgtaaaataacgccagccccacgccattatgatcaaaaatttcccacacacgaacgtcaggatggtagacaggaatatcaaaacgttcgacaaacttaataccgaagagctgattcgcggtccagaatacaccttcatttaacaccgtgtttaattcaaaatatggcttgagctgcgcctcatcaagatcaaatttctcccgccgtacctgttccgcataaaatgcccagtcccacggctgcgcgctaaacccgccctgctgcttatcgataaccgcctgtatggaggctaattcatcgctcgcacgttgacgcgccgctggaacaatttcccgcataaagttaagtgctgcttcaggtgtttttgccatctgatcggcgattttccatgcggcataatgaggaaaaccaagtagtgttgcctgttgtgcacggatctccaccagacgttgaatgatagcgcgggtatcattggcatcatttttttccgctcgcgtccagcccgcaataaacagtttttcacgcgtcgcacgatcgcgcatttcggcaagcgccggttgttgggtggtattcagcagcggaatcagccatttgttatccagacctttctcgcgagccgcctctgccgccagcgcaatctcttgctcactcattcctgccagctgcgcgatatcgttcacaaccagaccgccggatttatttgctgccagtaatcgctggttaaactggctggtcagggtcgcagcttctgtattcagtacttttaattttgctttatcagcttgcgcaagtttggctccggcaaggacaaaacgttgatgaatcacctccaccaggcggatggattcactatcaagccccagggattcacggcgctgccagacagcatctacccgcgcgaataattcaccgttcagatagatatcattagccagttccgccagttcagcggaaaactgctcgtcaagacgctgtaattcatcattggtatgcgccgcagtcatcgcaaaaaagacgctggtaacgcgggtaagtaattctccgctttgttccagtgccagaatagtattgttgaaatcaggcatttgcgggttaagcgcgatggcagcaatttctgcccgcttttgctgcattccctcatcgaatgccgggcgatagtgatgattggcaatttgatcaaaatggggagccagatacggcagtgtgctttgcacaaggaaaggattcattgttgtcattttcttctcctgaacgcgaggtgttccatagcgtaggcttactgataacggagtgcaatcttgcaatccagtattacccgctcttaagcatcccgtgctatgttattgacacacaaaagcgttgaggaacagtgagaagcgcagtgcccagccatcccgatactgctgctttcaccaaatccttagtgcttctttcgtgtttttctattgtcataatggttatctctaaaaaagaggtaagatgcgtactacttactcgccgttattggtattattcagaaaaagtgagtaagactttgcagcaatgtttttgatcctgttcaaataaactaatggcatcagcaacatgctggaaatcaaacgtatgggtaattaatttttctggtttaattaaccctttacttaaccagtcgataacgatcgggaatttatttgcatttaagcgactagagaaaatagagagttcttttccggtaattccttgctgaatcacttcagacggttcactggagaaccccatcaatacaatacgtgccgctggagaagccagcgttacggcctctttcaggatagaaggatgacaagccgcatcgataattaatgtcggcttgatgcctttttcagtgaaaatctcgccaagcggtgtctggctgttattaatcgcccagtcagccccgctctctttcgctttttccagtcgttcatcaatgcgatcggcaacaatcacatttttaacgttatagacgccttttaatacctgaacgatcgtcaggccgattggaccggcaccataaaccagaacggtatcattttcagtcggttgaccatgtccggttacgttagccgcaatggtaaaaggttcgatcattaccgcatattgatcggccactgcttcaggaattttccacgcattttttgccggaaccacggcatattcactgaaaccaccgtcagcgtgcacacctaatacagccagtgtcgtacaaacgttcggtttacctatagagcacggatagcaatgcccacagctgaccaccggatcgacagcaacacgttcaccgactctggcgctttccacgccttcacccactgcatcaatgacgccaaagaattcatgaccaatgacgcgcggatatttcgcaaaaggattatgcccacgataaatatggctatcactaccacaaattccggcaagtttcacttttactcgtacttcacccgcactcggggtgggtatttcacgttcgacaatcgccagttgattcggtttttcaattaatatgcttttcattatcttactccttaccagttccacagcgtgccatcttccagacgtgcgactggtagataagcaggttcatagggatatttcgccgccagcttttcatcgaattcgataccaagacccggtttgtctcccggatgcatatagccgttatcgaaagtccagttgtgcgggaagacttcgagcatttgttcggaataacccatgtattcctggacaccgaaattggggacccacagatcaaagtgcagcgccgcagccatgcagactggactcaaatcggaaggaccgtgactgccagtacgtacctgatacaggctagcaaaatcggcaatccggcgcataccggtaattccgcctgcatgggtcagcgtggtgcggatataatcgatgagttgctcttcaatcagttgtttgcagtcccagatgctgttgaagacttcacccactgcgatgggtgtgacggtatgttggcgaatgagacggaagcattcctggttttccgcaggcgtcgggtcttccatccagaacatgcgataatcttcaatgcttttaccaaagcgcgccgcttcaataggcgttaagcgatggtgcatgtcatgcagcaaatgttcattaaaaccaaacttgttacgtaccgcgtcaaacaatttcggcatgaaatcgaggtatttctccgtgctccacagctgctcttccggccactgtcctttggttgcgggttcataagccagacctttacctttgctcatgccgtaggtggttttcataccagggattccgcactgcacgcggatggctttgaatccaagctcttgatgacgggcataatcatccagagcttcatcaatactgtgaccggtggtatggcaataaaccatcaccccttcacgagacgcgccgccgagtaactggtaaagcggcatgttggcagctttggctttaatatcccacagcgccatatcaaccgcactaatggcgctcatcgtaaccggaccgcgacgccagtaagcacctttatagaaaaactgccagatatcttcgatacggtgcgcatcgcgaccaataagctgcggacaaaggtgatcctgcaaataagaggccacggaaagctcacgtccattgagggtggcatccccaaggcccgtaataccgtcctcagtggtgatttttaatgtgacgaaattacgccccggacaggtaacaaaaacttcagcctttacgatcttcatgttcgattccttgcatcgcttgtcgtgatgcatgaaatctacgcaactgagctactaccatacaagtataaagatcgaaaaaagccggagtgatcacaaaaaaaggcgtatatttgcgctgtgaatggttgacaaaagatgaaatagaataccttttgtcagctgacacttcctcttatcttattgataaaatggatttatgttcttacgtgcgcccccagcccgcaacaatgatcaacatgccgcaaagcgcaatcaacgcacccgtccagtcataaagagtcagtttcacgccatccacaacgcgcagccacatcaacgccgtgcagacataaacgccaccataagccgcgtaaacacgcccactcgccgctggatgcaacgttaacaaccagacaaacagcgccagactaatccccgccggaagcaacagccagatactggcgtttcgttttaaccacaaccagggcagaaagcatccaataatttcacacagcgcagtagcaaaaaatagtaacgttgttttaatcatctttgtctcttattgacatcatgtatagttatagggcgacataatatcatcaatataaacaccctcctggtacgttttgcgtccgcagtggatggtgtagaatcacctttaatcattcatacagggaatgaattatgaaaatcactctcagcaaacgaatcggcctgctcgctattctgctgccttgcgcactggcattgagcacaactgttcatgccgaaactaacaaactggtgattgagtctggcgacagtgcacaaagccgccagcacgccgctatggaaaaagagcaatggaatgacacgcgcaatctgcgccagaaagtgaataaacgcactgaaaaagagtgggataaagccgacgccgcttttgataaccgcgataaatgtgagcaaagcgccaacatcaatgcctactgggagcccaatactttgcgctgcctggaccgtcgaactggccgcgttattaccccctaacctgttattgatttaaggaatgtaaggacacgttatgccaagcgcccacagtgttaagctacgcccgctggagcgtgaagatttacgctatgtacatcaactcgacaataacgccagtgtgatgcgttactggtttgaggaaccctacgaagcctttgttgaactctctgatctgtatgataagcatattcacgatcagagcgaacggcgctttgtggtggaatgtgacggcgaaaaagccggtctggtggagctggtggaaattaaccatgttcatcgccgcgcagaatttcagataattatctccccggagtatcaggggaaaggtctggcaacccgtgccgccaaattagcaatggactatggctttaccgttctcaatctctataagctgtatctgatcgttgataaagagaatgaaaaagcgattcacatttaccgcaagcttggctttagcgttgaaggtgaattgatgcacgagttctttattaatggtcaatatcgtaatgccattcgcatgtgtatattccagcatcagtatctggcagagcacaaaacaccgggtcagactctcctgaagccgaccgcacaataacattaataataatcgatcgtatttttgatggtgtaaacccgttcgacggcgggttttactccttcatcaacaatgattagctgacagtccaccggattagcgtgactgtcatattcacagctctgttttacattaccaacccgttgattattcagtaaagtaaccgctgtgtaatctaattttttgatcggatccgtacttggcgtggcgctgacagataatgttttgtcgttacttttcgtggttttacccagcggataaccctgatcatcatagcgatattccatctgcatttgtttgctgctggctttaatcacgaagccattatcatcggtttcccaactcaccccggcagaaggtaattctgctagctggcattttccctgtaaacgtactctcttctccagcgtctcggcatcacggtaataattggcgtccagtaccagagcgaccacggtattattttccagatccagtaattcgagactatcaaaacagccttcttcgctcaaagtcccagaaacacgtttcgtcacttcaccttgctcatccattaatgtctgagtgaaatcttttaccggaccacgcagcggatcaaaatcgaattcattagagaaactggccatctcaggggtaaaactaagtgttacctctgtgcggtcacatcctgtgaggaatatcgcgagtaagcatggtagtaatttgtatttcacaacagtcaccagagagtagagatgattctcaatcatagtagcaaatacagtactttacacgttaaatgctatgcttaaagaagttatcttcgcgtaaggagcttatgatgaaactcagtacctgctgtgccgcgcttctgctcgccctcgccagtcccgcggtactcgccgcgccgggatcctgtgagcgcatacagagcgatataagtcagcgcattatcaataatggcgtacccgaaagcagcttcacgttaagtattgtacccaatgaccaggttgatcagcctgattcccaggtcgtcggccattgcgctaatgatacgcataaaattctctatacccgcaccaccagcggtaacgtctctgctcccgcgcagtctagccaggatggcgcgcctgccgaaccgcagtaacacattatcgactgaacgccggatatgacaaatccggcgatttgaacatacaacataatcccaccttattactcatacccttctattgatatggattaataattcttaacccaaaatgggtagactccctctattgttagcgcgctaaatattcaatatataaacttttatataacgataaagaacagggagtgagttatgtccaaaaatgaacgaatggtgggcatcagccgcagaacactcgttaaatctaccgcgataggttctctggcgctggctgcaggcggtttttctttgccgtttaccctgcgcaatgcagcagcagcggtacaacaggcccgcgaaaaagtggtctggggtgcctgttccgtcaactgtggtagccgctgtgcacttcgtctacatgttaaagataatgaagtgacctgggtggaaactgacaataccggcagcgatgagtacggcaaccatcaggtacgcgcctgtttgcgcggtcgctccatccgccggcgtattaatcatcccgatcgcttgaattacccaatgaaacgcgtgggcaaacgcggcgaaggcaaattcgaacggattagctgggatgaagccctggatactatcgccagtagcctgaagaaaaccgtcgaacaatatggcaatgaggctgtatatattcagtactctagcgggatcgttggcggcaatatgacccgctctagcccaagtgccagcgcggtcaaacgcctgatgaactgctacggcggtagtctcaaccagtatggctcctacagcactgcgcaaatttcctgtgccatgccctacacctacggcagtaatgatggcaacagcaccacggatattgaaaacagcaagctggtcgtgatgtttggtaacaacccggcagaaacccgcatgagcggtggtggcatcacttatcttcttgaaaaagcgcgcgagaaaagcaacgccaaaatgattgttatcgatccgcgatataccgatacggctgccggtcgtgaagacgaatggctccctattcgcccgggcaccgatgccgcgctggttgcgggtattgcctgggtattgattaacgaaaatctcgttgatcaaccttttctcgataaatactgcgtcggctatgacgaaaaaaccttacccgcagatgcacccaaaaatggtcactataaagcctatattcttggtgaaggtgacgataaaacagcgaaaacgccgcagtgggctagccaaattaccggtatcccggaggaccgtatcatcaaactggcgcgtgaaattggcacagcaaaacccgcttatatctgccagggctgggggccacaacgccaggcaaacggcgaactgactgcacgcgctattgctatgttacctattttgacgggcaatgtcggcatcagcggcggaaatagtggcgcgcgtgaaagcacctataccattaccatagaacgcctgccggtgctggataatccggtcaaaacgagtatctcctgcttcagctggacagatgctatcgatcatggtccgcaaatgacggcaatccgcgacggcgtccgcggcaaagataaactggatgtgcccattaagttcatctggaactacgcgggaaataccctcgttaatcagcattctgacatcaacaaaacgcatgaaattctgcaggacgaaagcaaatgcgaaatgattgtggtcatcgaaaactttatgaccagtagcgcaaaatatgccgacattctgctgccagacctgatgaccgttgagcaggaagatattattcctaacgactacgccggtaacatgggatatctcattttcctccagcctgtcaccagcgaaaaattcgaacgcaaaccgatttactggatcctgagtgaagtcgcgaaacgtcttggacctgacgtctatcaaaagttcacagaaggtcgcacgcaggaacaatggttacaacatctgtacgccaaaatgcttgccaaagatccggcgttaccgtcttacgacgaactgaaaaaaatgggtatctataagcgtaaagatcccaatggccattttgtcgcctacaaagcatttcgtgacgaccccgaggcaaatccacttaaaacgccttccggtaagattgaaatttattccagcaggctggcggaaattgcccgtacctgggaactggaaaaagatgaagtgataagcccattgccagtttatgccagtacctttgaaggctggaactcccctgaacgtagaaccttcccactgcaactgtttggtttccattacaaatcccgtactcacagcacctacggcaatattgatctcctgaaggctgcctgccgtcaggaggtgtggatcaaccctatagatgcgcagaaacgtgggattgccaacggcgatatggtgcgggtgtttaaccatcgtggcgaagttcggctaccagccaaagtaacaccacgtattctccctggagttagcgctatgggccagggagcctggcacgaggccaatatgtctggcgataaaatcgaccatggcggctgtgtgaatacgctaaccactctgcgccctagtccactggcgaagggaaacccgcagcacactaatctggtcgagatcgaaaaaatataacccacgacaaccataaattctggcatgacattttgtttgaaaagcaataagtgagtaatgatgaaaatccataccacagaggcgctcatgaaggctgaaatcagccgtagaagtctgatgaaaacctccgcacttggcagtcttgcgctggcaagcagtgctttcactctgccattttcccaaatggtccgggcggcagaggctccggtagaagagaaagcggtctggagttcctgcaccgttaactgcgggagccgctgtctgttacgtttgcatgtgaaagatgacaccgtgtactgggtggagtctgatacgacaggtgacgacgtctacggtaatcatcaggttcgagcgtgtttacgcgggcgctctatccgccgacggatgaatcatcctgataggttgaaatatcccatgaagcgcgtcggcaagcgcggtgaaggtaaatttgaacggataagttgggacgaagccctggataccatcagtgataatcttcggcggatcctgaaagattacggcaatgaggctgtacatgtcctgtacggaacaggcgtagatggcggaaacatcaccaacagtaacgtcccgtaccgtctgatgaactcttgcggtggttttctcagtcgctatggcagctacagtaccgcacagatcagtgccgcaatgagttatatgttcggtgccaatgatggcaacagcccggatgatatcgccaatacgaaactggtcgttatgttcggaaataacccggcagaaacgcggatgagcggcggtggtgtcacttactacgtcgagcaagcccgcgaacgtagtaacgcacgcatgatcgtcatcgatccacgttataacgacactgctgccgggcgtgaagatgaatggctgcccattcgccctggcaccgatggcgcactggcctgtgcgattgcctgggtactgattactgaaaacatggtcgatcagccatttctcgacaaatattgtgttggttacgatgaaaaaacgctgcccgccaacgcaccacgtaacgcgcattataaagcctatattctgggcgaagggcctgacggcatagctaaaacgccggaatgggcagcaaaaatcaccagcatcccggcagaaaaaattatccagttggcacgagagatcggtagtgcaaaacctgcttatatttgtcagggttgggggccacaacgacattccaacggcgagcaaacatcccgcgctattgccatgcttttcgttctcaccggcaacgtcggcataaacggcggcaacagtggcgtacgcgaaggtagctgggatctgggggtagaatggttcccgatgctcgagaatcctgttaaaacgcagatttccgtctttacatggacagatgccatcgaccatggtacggaaatgaccgcgacccgtgatggtgttcgtggaaaagaaaaactggatgtccccatcaagtttttatggtgctacgccagtaacacattgatcaatcaacatggcgacatcaatcacacccatgaggtgcttcaggatgacagcaagtgcgagatgattgttggcattgaccacttcatgacggccagcgctaagtattgcgatatcctgttgcccgacctgatgccaacagagcaagaagaccttatctctcatgaatctgcagggaatatgggctatgtgatcctcgcccaacccgcaaccagtgcaaaatttgaacgcaaacccatctactggatgctgagtgaagtcgccaaacgcttaggaccagacgtttatcaaacctttactgaaggtcgcagtcagcatgaatggatcaaatatctccatgcgaaaacgaaggaacgtaaccctgagatgcccgactacgaggagatgaaaacgaccgggatctttaagaaaaaatgcccggaagaacactacgtcgctttccgcgcattccgtgaagatccacaggcaaacccgttgaaaacacctagcgggaaaatcgaaatttattctgaacgactggcgaagattgcagatacctgggaattgaaaaaagatgaaattattcatccccttcctgcgtataccccaggttttgatggctgggacgatcccctgcggaaaacctatccactgcagttaacgggcttccattacaaagcgcgtacccactccagctacggcaatattgatgtgttacagcaggcctgcccacaagaggtgtggatcaaccccattgatgctcaggcacgcggtatccgtcatggcgataccgtgcgggtatttaacaataatggagaaatgctgattgccgcaaaagtgactccgcgtattctgcctggcgttaccgccatcgggcaaggtgcgtggcttaaagcggatatgtttggtgaccgggtcgatcacggcggcagtatcaatattctgacctctcaccgccctagtccgctggcaaagggaaacccgagccacagcaatcttgtccagatcgaaaaggtttaaggagtagcccatgaccacacaatatggattttttatcgattccagccgctgtactggctgtaaaacctgcgaactggcgtgcaaagattttaaagatcttggcccggaagtcagtttccgccgtatttatgaatacgctggcggcgactggcaggaagataatggcgtctggcaccagaacgtgttcgcttattatctctccatctcctgtaaccattgcgatgaccccgcatgtacaaaagtctgccccagcggcgcaatgcataagcgtgaagatggctttgtggtggttgatgaagatgtttgtatcggctgccgctactgccacatggcttgtccgtacggcgcgccacagtacaatgctgaaaaagggcacatgacgaagtgcgatggttgttatagccgcgtcgccgaggggaaacaacccatatgtgtcgaatcctgcccgctgcgtgcacttgagttcggtccaattgaagagctgcgccagaagcacggcactcttgctgccgtcgcgccactgccgcgcgcgcatttcacaaaacccaatatcgttatcaaacctaacgccaacagccgcccgaccggcgataccactggttatctggctaatccggaggaagtgtaaaatgggaaatggatggcatgagtggccactggttatctttaccgtattgggtcaatgcgtagtaggcgcgctgattgttagcggaattggctggttcgccgccaaaaatgacgcagaccgtcagcgtattgtccgtggcatgtttttcctctggctgttgatgggcgtcgggtttattgcctctgtcatgcacctgggaagcccactgcgggcgtttaactccctgaatcgaatcggagcttctggtctgagtaacgagattgctgccggttccatattttttgccgttggcggattatggtggctggtggcagtcatcggtaaaatgccgcaagcgttggggaaactctggttacttttcagcatggcgctcggcgtcattttcgtctggatgatgacctgcgtgtatcaaatcgacaccgtgccaacctggcataacggttacactacgctggctttcttcctgacggtattgttgagcggtccaatacttgctgccgcaattctgcgggcagctcgcgttacatttaataccacaccatttgccatcattagcgttctggcgctgatcgcttgtgccggggtgattgtgctgcaaggtttgtctctggcgtctattcacagttccgtgcaacaagccagcgcactggtaccagattacgcctccttacaggtctggcgtgtggtattgttatgcgcaggtcttggatgctggctttgcccgctcattcgtcgccgtgaacctcacgttgccggacttattctggggctaatcctcatacttggcggtgagatgatcgggcgtgtgctcttttatggcctgcacatgacagtaggaatggctattgcaggttaacaaattggtgcggggcaacccgcacatttcaggatgttaggaatgacccattttagtcagcaagataatttttctgtcgcggcgcgcgtgttgggcgcgctgttttattacgctccagagagtgcggaagccgcacctctggttgcggtactcaccagtgacggctgggaaactcagtggcctctaccagaagcgagtttagcgccgctggtgacggcttttcagacacagtgtgaagagactcacgcccaggcctggcagcgtttgtttgtcggcccgtgggcactgccgtctccgccgtgggggagcgtctggctggatcgcgaatctgtgctgtttggcgatagtacattggcacttcgtcagtggatgcgcgagaaaggcattcagtttgaaatgaagcaaaacgaaccggaagatcattttggtagtctgctgttgatggctgcgtggttggcggagaatggtcgccagacagaatgcgaagaattgctggcatggcacctttttccgtggagtacacgttttcttgatgtttttatcgaaaaagcagaacaccctttctaccgtgcactgggtgaactggctcgcttaacgctggcgcaatggcaaagtcaactgttaattcctgtcgcggttaaaccgctgtttcgataagatcaccgtaatattgccggatggtgacgattacgcgcaatccggcaataataggttacagtgtcacgtttttttatctcttaaagcacgcactgcttttgcggctggcctcttttgccgcaaaatagtcgcccgtgtttcattgcccatttctgctcatgcatcatctacacatctatccggatctgcgcactatgttccaccgtctgcttatcgcaacagtcgtcggtattctcgcggcctttgccgttgccgggtttcgtcatgcgatgctgctactggagtggttgttcctcaataatgactccggcagtctggtcaatgcagcgacaaacctttccccctggcgacggttgctaactccggcgctcggcggactggcggcgggtttgttgctgatgggctggcagaaatttacccaacaacgccctcatgcgccgaccgattatatggaagcgttgcaaaccgatggacagttcgattacgcagcaagcctggttaaaagccttgcctctctgctggtagtaaccagcggcagtgcaattggtcgcgaaggtgcgatgattcttttagctgcccttgccgcctcctgttttgcccaacgttttacgccacgccaggagtggaaattatggatcgcctgtggggccgcggcgggaatggctgcggcctatcgtgccccgcttgctggcagtttatttatagccgaagtgctgtttggcactatgatgttggcctctctcggcccggtgattatttccgccgtcgtggcattgctggttagcaatctgattaatcatagcgacgcgttactctacaacgtacaactcagtgtgacggttcaggctcgtgactatgcgctgattatcagtacaggtgtgctggcaggtctgtgcggaccactgttgttaacgttaatgaacgcctgtcatcgtggatttgtgagtctcaaacttgcgccgccctggcaactggcactaggcgggttgatcgtgggtctgctttccctgttcacacctgcagtgtggggcaacggctatagcaccgtacaatcctttttaaccgccccaccactgttaatgatcattgccgggatcttcctttgtaaactgtgtgccgtgctggcgagtagcggttccggcgcacccggtggggtctttacaccgacgctatttatcggtcttgccattggcatgttgtatggtcgtagcctgggattatggttccctgatggcgaagaaattacacttttactcggattgaccgggatggcgacactgttggcggcgaccacgcacgcgccgattatgagcacgttgatgatatgtgaaatgaccggggagtatcagctactccccggtttattgattgcctgcgtaattgcgagcgtaattagccggacgttacaccgtgactctatctaccgccagcacactgcgcagcatagctaagcggatgtattgccccagttcacgctgttcggcgcgcggcagataaggcagttcaccaatgagcggtgccggaagttttttacccagcacatcaatgatttccgcataatgcgccagtcctgggttgattcggttagccacccagccaatgagcggcagcccgtcgttggcgatcgcctgagctgttagcagtgcatggttaatgcaaccttcctgaataccgacaaccatcaacaccggcagttgttcctgcactacccattcagagagtggacgcaaatcattcatcagactgcgccagccgccagtcccttctaccacgacatgatcgactttttcggtcaggtttgccaggccgttactaatgagggtgtaattgattgggcaactgtgcgccacgctactttcttcttcgcttaacgcgataggattaactgcttcataaggcagttcgatggtactaacactctgcaacaccagggcatctttattacgcagcccttcgggtgtctctttgctccccttcgctacgggtttatatcccgcaaccgtttttccctgggaggctaacgcttgtagcaatgcgcgggaaaccaccgttttccctacagaagtgtctgtaccggtaataaagaaacgcttcagcatcactaactccaccgttatgcttcacaaatataaaccaggaaaataattaaccttgaaagtctaagttatgctttcctggcccaaattgagatagcgcaaattttggtagaacagttaaaaaatgttaaccctgcaacagacgaatcaacaaagaaccgttatacatcgcgtcttttaccagtgcagcgcctgccatcgtgccctggttagaaaactgagtactctcaacgctgatgtgctgactatacgcaggaagggcctgctgacggatgctgtcactgatgaccgggaagaggatatctgccgctttacttaacggactgccaatcagtattttttgtgggttaaataaattcaccatgatggcaagaatgcgcccgacatgcgcgcccaccccggtaatgatgtcttttgccagtagatcgccgcgcaatgccgcctgacacaaactgtccacggttaacggttgtccatgtaacatgctgctcatggattgattaagacgcagctgtgccagctcaagaatactgtccacgctggcgatggtttcgaggcagccgtgattcccgcaataacagcgtttcccatacgggtcgacctgtgtgtggcctatttccacgagactactgctgcctgcgtgtagcagatgaccatcggtaatgacgcccgcccccacgttgtgatcgataaccacctgaatcacatcgcgcgccccgcgactggcaccaaacaaggcctctgccatcgtccatgcgctgatatcatgctgaatataaaccggaacgccggtatgctgctccagcgcctcgccgagcggcatctcttttacatcctcgtagaacggcatgcgatgtacaataccattttccgtatcaataattcccggcaaggttatggcaatgctagttagacgctcaagttttttctggtggcggataaaaaactgatcgatatgggaaataatacgatccagcaatggcaagtcatcttttaacgccagttcctggctctcttccaccaccagtttgctgctcagatcgcgcagagcaaggaaaatctccccgcgactaatgcgcagagaaagatagtgccaggcttcagtttcaaccaccagccccaccgccggacggccacggttccccgcttctttgatttccagctcttgcaccaggtgtgcttcgagcatctcacggacaattttagtgatactggcaggagccagttgcgccagacgggaaagatcgatacggctgactggaccaagctgatcaatcaggcgataaaccgcgcccgcgttggtctgctttatttgatcaatgtgcccaggctggttttcagcaaccaccgcatactccctatattttcgcgctccgaaataatctgtaggctatggtgaagcacttcaatacgtgtcgtcaaatttttacttaggcatgtgattaacagcacatttttcgggctttttcgctgaaatttccctcacctgagagcattcagcagatgaatacgaaagttacgcgcagccggactttgttcatgatgtttcggccagaccaaccacatttcagaaaccgcatcctcttcagcaatcggcacccagcgcatttcgttgagctgaacacgtttaaaactcgcaggcaaaatactaacacccagaccggcggaaaccagaccgatgatggtcattgcctcgcccacctcctgagtgatgacgggcgtcaaatggtaacgtcgcatcagcccgagaatatcgtcatacagccctgtcccgacgtgcggatcaaaaaagacaaagggttctttcgccagttcagccagcgttacattcgggttatttgccaggggatgatcgtgcgggatcatcgccataagcggttcatggacgatgactgcgtgttcaaggctctccggtaacgctgtgttacgcagcaatcccatatccagcgttccttcaatgagcggagcgatttgctcgcgagtgttcatttcgcgggtttgtaaatggacatcaggataatcacggcgaaacaggcttaacgtatcggacaccgcccgaataaaaggagcgctgctagtaaaaccaatgcgcaactcccccgcttcaccctgatgcagcctttcagcgcgagcggcagcgtcatccaccatagacaggatttgccgactatctgcaagaaactgttttcctgctgccgtcagcaatacactgcgattggttcgtgccagcagtcgggcaccaatttgttgctccagcgcctgaatctgctgacttagcggcggttggctaatattcaggcgggcagcggcgcgcccgaaatgcagctcttccgcaacagcaacaaagtaacgcagatgacgaagttcaatattcatatttaaaacatcttatttgagattattaatatattagacagaacaattcgattttcctaccctatgtataagcctgatctacaggcatatttagcaaggatttcaagtgagccgtactacaactgttgatggcgctccggcaagcgacactgacaagcaaagcatttctcagccaaatcaatttattaaacgcggtacgccgcaatttatgcgcgtcaccctggcgctgttctctgccggactggcaacatttgcacttctctattgtgtgcagcctatccttccggtgcttagccaggagtttggcttaacccccgcgaacagtagtattagtctgtccatttccacggcgatgttggctattggtttgctgtttactggcccgctatccgatgccattggtcgcaaaccagtgatggtcacggcgctactgttggcctccatttgtacgttacttagcacaatgatgaccagctggcacggcattttgattatgcgcgccttgattgggcttagcttaagtggcgtggcagctgttggcatgacttatcttagcgaggaaatccatcccagtttcgtggcctttagtatggggttgtatatcagcggcaacagtattggcggcatgagcggacgcttaattagcggtgtcttcacggactttttcaactggcgaattgctctggcggcaatcggttgtttcgcgctggccagcgcgttgatgttctggaaaatcctccctgaaagtcgccattttcgcccgactagcctgcgccctaagacgttgtttatcaactttcgtctgcactggcgtgaccggggattaccgttattgttcgcagaaggctttttgctgatggggagcttcgtcacgctgtttaattacatcggctatcggttgatgctctccccctggcatgtcagtcaggccgtggttggcttattaagcctggcttatttgaccggtacatggagcagtcccaaagccggaaccatgaccacccgctatgggcgtggtccagtgatgttgtttagcacgggggttatgctgtttggtttactgatgaccttattcagcagcctgtggctgatctttgccggaatgttactcttcagtgcaggattcttcgcagcccacagtgtagccagcagctggatcggcccccgcgcaaaacgcgctaaaggccaggcctccagcctgtatctgttcagttactatctggggagcagtattgccgggacgctgggtggtgttttctggcataactatggctggaacggcgtcggcgcatttattgctctgatgctggtcattgctctgctggtcgggacgcgtttgcatcgtcgtctgcacgcctgaaaaataagtccggactgcggtaaatacccgtccggacttattgccagctcaaaccaacgttaatagccatcctaaaatagacgaagcgccagccaattcccgcagcgcgtctagcgtcatcaggattataagtacccaaataaacggattcattttgctgtgtgtcatttattactgatgcgcagttattctactgctttgtaagtagtaaaatagttaacccgatcaagactactattattggtagctaaatttcccttaagtcacaatacgttattatcaacgctgtaatttattcagcgtttgtacatatcgttacacgctgaaaccaaccactcacggaagtctgccattcccagggatatagttatttcaacggccccgcagtggggttaaatgaaaaaacaaattgagggtatgacaatgaaaaaagtattagctctggttgttgccgctgctatgggtctgtcttctgccgcctttgctgcagagactacgaccacacctgctccgactgcgacgaccaccaaagcagcgccggcgaaaactacacatcataaaaaacagcataaagcagcacctgcccagaaagcgcaggcggctaaaaagcatcataaaaatacgaaagctgaacagaaagcccctgaacaaaaagcgcaggcagcgaagaaacacgccaagaaacacagccatcagcaaccggcaaaacctgctgcacaacccgcagcgtaagttttcaacagtaatgctggcgcgccccctcgcgcctgaaaattacggtgctaagcgggtaacgtttagcaccgcctttagcggagggtagtatggtgggccgttatcgctttgagttcattctgatcatccttattttatgcgcactgattaccgcccgtttttatctttcctgattgtagttatctgattttactcccactttcatcccgtcccgtctatagtatttatgagggtttgcttttaataatcataattacccaccagagtgtgatatgcgtacaaccattgctgtagtgttgggtgcaattagtttgacgtctgcttttgtgtttgcagataaaccagacgttgccagaagcgcaaacgatgaggtcagcaccctgttttttggtcatgatgatcgtgtgccagtgaatgacacgacccaaagtccgtgggatgcggttgggcaactggaaacggccagcggcaatttatgtacggcgacgctgattgcacccaatctggcattaacggcaggacactgtttattgacacctccaaagggtaaagccgataaagcagtggcgctgcgttttgtgagtaataaaggtctttggcgctatgagatccacgacatagaaggccgcgttgatccgacactgggaaagcggttaaaagcagatggggatggttggattgtacctcccgcagccgcgccgtgggacttcggattgattgtgctacgtaatcccccttctggcattacgccgttgccgttatttgagggagataaagccgcgcttaccgccgcattaaaagcggcaggtcgtaaagtgactcaggcaggctaccctgaagatcatctcgatacgttgtacagtcatcaaaactgtgaagtgactggctgggcgcaaacgagcgtgatgagtcatcagtgcgataccttgccgggtgacagcggtagccctctgatgttgcataccgatgacggctggcaattaattggggtgcaaagtagcgctcctgccgcgaaagatcgctggcgcgccgataaccgggccatttctgttaccggttttcgcgacaagctggatcaactgagccaaaaataatgttcaaacgctgcccgacagcgcgggcagcgtcttcatcaggcaagtttcaccatgatcattccagccaacagcaagaccaggccaatccagcctttacgatttaaccgttgaccaaacaagatccaacctgcggctaacgtggcggcaataccaaacccgccccacaatgcataagcgacagacaagtcgatccctttaacggcttgagaaagcgcactaaaggcagccagcaccgccgccagggagagcaagccaaatattttgcgacgaaagccgtcagaaaatttcaaaaagacgttagcaacgatttccagcacgattgccaatgccagccaggcggcgtgaacccattcaaactgcgccatggttcacctccagttcaggtttacgcgctttacgggtaccactttttatcaacacaatcccggcgaccagggtggttaacccggcaattttcatcaggcttaaactttcgtcgaataacaaaacgctaaacaaggtaataaataaaataccgataccttcccacagcgcataagctacgcctaaggcgatttttttaacggcgaaagagagaaatatatagctcagagaaatcatcaccagcattaaaataaagccgccatttccctcactgacgctcgcccatttcatactcagcgtaccggtaatttctgtagcaatagccagacctaataaaatccaataaatatacattgtccttctcctgcaagagaattattttaattttcgcttaattcagcgaaaccaaagtaaagtggtcaagccccgcgcatagcgcaagctttggcagaagaaaggactaaagcgcgttgcgccagtgctgctcacctacgagcaagatagtggatgaggtacgaagatgggtaaatgtagaaaataacgtcctgaacaaattgtccataatattacaattatccgcagtgttgcttctcgtcatcgcggatgataattgtcctcggtagttgaacacgcctgatttgtatcatagcttaagaattaactcaaaatattttcacttctttacctgagcggtttgattttcgttatgatgacggagcgaaaaagacattattattagcaaaggaagaaaaaacggggacaagcatggcaaagccgatcatcacgctcaatggcctaaaaatcgtcattatgttgggaatgctggtcattattctctgcggtatccgttttgccgccgagatcatcgtgccgtttattctcgcattatttattgctgttattcttaacccgctggtgcaacacatggtccgctggcgtgtgccgcgtgtactggcggtgagcattttgatgaccatcatcgtgatggcgatggtgttgctattagcttatctgggttccgcgctcaacgagttgacgcggacgttaccgcaatatcgcaactctattatgacgccgctgcaagcgcttgaaccgttgttgcaacgcgtagggattgacgtcagtgttgaccagctggcgcattatattgatccgaacgcggcgatgacgttgctcaccaacttattgacgcagttatctaatgccatgagtagtatatttttattgctgctgacggtgctgtttatgctgctcgaagtgccacaattgcccggaaaatttcagcaaatgatggcgcgtccggttgaagggatggcggcgattcaacgtgcgattgacagtgtttctcattatctggtgctgaaaacagccatcagcatcatcaccggcctggtcgcctgggcgatgctcgccgcactcgatgttcgcttcgcttttgtctggggattgctggcctttgcgcttaattacatcccgaatattggtagtgtcctcgcggcaatcccccctatcgctcaggtactggtgtttaatggcttctacgaagcgttgctggtgctggcgggatatctgctgattaatctggtcttcggcaatattctggagccgcgtatcatggggcgtgggctggggctttccacattggtggtatttttgagcttgattttttggggatggttgttaggaccggtgggtatgctgctttccgtgccgttgacaattattgtcaaaattgcgcttgaacaaacagcgggaggtcaaagcatcgccgttctgttaagcgatctcaataaagagtgacggcctcagcagaggccgtcagggttacagagctttcaggattgcatccacgctggctttggcgtcaccaaacagcatgtgggtgttttccttgaagaacagcgggttttgcacaccagcatagccagtgttcatgctacgtttaaagacaatcacgttctgcgctttccacacttccagcacaggcataccagcaatcggactcttcggatcatcctgcgccgccgggttaaccgtatcgttagcaccaatcaccagtacggtatcggtatcagcaaagtcatcattgatctcgtccatttccagcacgatgtcatacggtacttttgcttcagccagcaatacgttcatatgtccaggcaaacgccccgcgaccgggtggataccgaaacgcacattaataccacgagcgcgcaatttctcagtaatttcagcgacaggatattgcgcctgcgcgactgccatgccgtaccccggagtaatgatcacactatgggagtttttcagcagttccgctgtctcttctgcggtgatttcgcggtgctcacccacttcctgatcatcgccagtagaagagccgtcggtgccgaaaccacccgcaataacgctgataaaggaacggttcatcgccttacacataatgtaagaaaggatagccccgctagaaccgaccagcgcaccggtcacaatcagcaggtcgttgctgagcataaagcccgcagccgcagccgcccagccggagtagctgttcagcatgctcaccaccactggcatatctgcaccaccgatggaggcgactaaatgccagccgaataccagcgcaattgcggtcattatcagcaatgccagcacttgcaggccgacgctgtccgtgcgaacaaatacaatcagcagcaggaaggaaacgaccagagccgccaggttcattttgtgacggtttggcagcatcaatggtttagagctaatcttgccacacagtttgccgaacgccaccacgctacccgtgaacgttaccgccccgatgaagataccgaggaacacttccgtcaggtgaatattgaccagaatcggtgccattcccgcgtcatgatgcagatagctgttaaagccaaccagcactgccgccagacccacgaagctatgcaggatcgccaccagttctggcatttcggtcatttcaactttcttcgccagacggataccaattgccccaccaatgaccatcgccagcaagatccagccaacattacccgtatccggtccaaaaatggttgcgattaacgcaatcgccatcccggcgataccgaagttgttaccctggcgagacgtttcatgtttgctaagaccggccagactgaagataaacaggatcgcggcaacaatgtatgcagctgtaactaatcctccagacatatgttaccccttaatttttgcggaacattttcagcatgcgctgagtcacggtgaagccaccgaaaatattaatgctggctataagcaccgcgataaaactaaggaagctaacccagccgccctggccaatctgcaacagtgctccgacaacaataatcccactaatcgcgttggtgacgctcatcaacggtgtatgcagcgcgtggcttacattccacaccacgtaataaccgacaacgcaggccagcgcgaaaacggtgaagtgcccaaggaattctttcggcgcaacgcttgccatccagccaaaaagaatgattgccagcgccatcaacgcgtatttacgccacggactgcaggtacatttttcctcagttttcacttccggtgccgctttttgtgccgcctgcggctgagcacttacctgaatcggcggtgccggccaggtaatttcgcccgcacggatcacggtcacgccgcgaatcaccacatcatcaaaatcaacagtgatattgccgtctttctctttgcacaacagtttcagcagattaacgaggtttgtgccgtaaagctgactggattgcgtcggcagacggcccggaagatcggtataaccaatcactttgacaccattttccgtagtgaagatttcacccggcacggtgtattcacagttgccgccgttttgggctgccaggtcgacaatcacactgcccgccttcatggagtcaaccatttcacgggtaattagcttcggcgctggtttgcctggaataagcgcggtggtgacaatgatatcgacctcttttgcctgggcggcaaagagttccatttccgctttgatgaacgcgtcgctcatcactttggcatagccatcgccgctgccagcttcctctttaaaatccagctcgaggaattccgcgcccatactttgaacttgttctttcacttccgggcgggtgtcgaatgcacgcacaatcgcgccgagactgtttgctgcgccaatggcggccagacctgcaacacccgcaccaatcaccatcacttttgccggtggcactttcccggccgcagtaatttgcccggtaaagaagcgcccaaattcatgtgccgcttcaacaatggcgcgataaccggcgatgttcgccatgctgcttagtgcgtccaggctttgtgcgcgactgatacgcggcacagagtccatcgccatcacggtcacgttacgttccgcaagtttttgcattaattccggattctgcgcaggccagataaaactcaccagcgttgtcccaggattcagtaacgcaatttcatcatctaacggcgcattgaccttcagaatgatctcactctgccagacgctattcccttctacaatttcagcgcccgcttgcacaaacgctttatcgtcaaaacttgccagttgacccgcgccgctctctaccgcgacggtaaaacccagtttcagcagctgttccactgtttttggcgttgctgcaacacgggtttcattggttaaccgttctcttggtatgccaattcgcatgatattcccttccatcggttttattgatgatggtttgcctgtgtcaggagccacacaagctgctcatgtacgagctaaatgttactccgttaaaataaattagtaacaaacgccctataacgtactgaaaattatgcctgtgatctagcgccaaaaatcagtatttcggcgtgaactcgcaaaatattaacgattcagccgtgatagtgggataaacaccttagaacgccggataaagactgataattgtcttcgacggtcgggtaaaacgagacatcgccccggcacgaatcactacttaacattaaattaacttatacaattcagttgcttcagtagtaatgatgctgatacggctgttttttaagcatagacggtcatttgagcaggattaaaattggcttaaggaatgtgatatgaaaaatgacgcagacagttacaccgtttaaatgcaataatcagccacgtttctcgttaataacaataccagtacctggtttgcgcaaggcgaaggattatttttatgaagcttaagaacaccctcctggcgagcgcactgctttctgctatggcattctccgttaacgcagcaacagaactgacaccggagcaagcggcagcggttaaaccttttgaccgtatagtggttaccggtcgttttaatgctattggcgaagcggtgaaagccgtttctcgtcgcgcagataaagaaggtgccgcctctttttatgttgtcgacacttctgattttggtaacagcggtaactggcgtgtggtcgctgacctctataaagccgatgctgaaaaagcagaagaaacaagtaatcgcgtaattaacggtgttgtcgaactgccgaaagatcaggctgttctgattgaaccgtttgacacggtcaccgtccagggcttctatcgtagccagccagaagtcaatgatgccatcaccaaagcggcaaaagcgaaaggtgcctactctttctacatcgttcgtcaaatcgatgccaaccagggcggcaaccagcgtattactgcattcatctataaaaaagatgctaagaaacgtatcgtccagagcccggatgtgatcccggcagattccgaagcaggacgtgcagctctggctgccggtggcgaagccgcgaagaaagttgagatcccgggtgttgcgactaccgcaagtccaagttctgaagtcggtcgcttctttgaaacccagagtagtaaaggcgggcgttacaccgtcacgctcccggatggcactaaagtcgaagaactgaacaaagcgaccgcagcgatgatggtcccgttcgacagcatcaaattctctggcaactacggcaacatgaccgaagtctcctatcaggttgcgaaacgtgccgcgaagaaaggtgctaagtattaccacatcacccgccagtggcaggaacgtggtaataacctgaccgtcagcgcagatctgtataaataactattcagttactcctataaggcggcttgatgccgcctttcgcatttttagtcacaaatttccccgcgaccattgcatgcagacacatctcttcgtaaaatcccgcgcttcagtggcaaactccatttttatgcgttttgccctaatatttattcttcttatcacgttttaatcactggatatcgatggaaaagaaactgggactgagcgcactcaccgcgctggtattaagcagtatgctgggcgcgggtgttttcagtctgccgcaaaatatggcggcagttgccagcccggcagcactgctcatcggctggggtattactggcgctggcattttattgctggcctttgccatgctgatcctcacgcgcattcgtcccgaacttgacggcggtatctttacctatgcccgcgaagggtttggcgagctaatcggcttttgttccgcatggggatactggctgtgcgcagtcatcgccaacgtctcctatctggtgatcgttttttccgcgttaagcttttttacggacacgccggaattgcgcctgtttggcgatggtaatacctggcaaagcatagtcggtgcaagcgctttattgtggattgttcactttttgatcctgcgcggggtgcaaaccgctgccagcattaacctggtggcgacactggcaaaattgttgccgctgggtctgtttgttgtgctggcgatgatgatgttcaaactggataccttcaagctcgacttcaccggacttgcacttggcgtacccgtttgggaacaggtgaaaaacaccatgctgatcaccctgtgggttttcattggtgtggaaggtgccgtggttgtttctgcgcgtgcgcgtaataaacgtgatgttggcaaagcgacactgctggcggttctctccgctctgggcgtttacttgctggtaacgctgcttagcctgggtgtggtggcacgtcctgaactggctgaaattcgtaacccgagtatggccggtctgatggtggaaatgatgggaccatggggcgaaatcatcatcgctgccggtttgatcgtttccgtttgcggcgcgtacttaagctggaccatcatggcagcagaagtaccgttcctggccgccactcataaagcattcccgcgcatttttgcgcgccagaacgcacaagctgcgccatccgccagtctgtggttgaccaacatctgcgtgcaaatttgtctggtactcatctggctgaccggttccgattacaacacgttgctgaccatcgccagtgaaatgattctggtgccctatttcctggtcggcgcgttcttgctgaaaatcgcaacccgtccactgcataaagcggtaggtgtcggtgcctgcatttatggcttatggttattgtacgcctctggtccaatgcacttgctgttatccgttgttctgtatgcaccggggctgctggttttcctgtacgcgcgcaaaacgcatacccatgataatgtactgaaccgtcaggaaatggtgctgattggcatgctgttaattgccagtgttccggcgacctggatgctggtgggataacgttcatcccatcgttggatagcaaaggagataacgatgggtaaaacccagcccttgccaatattaattactggcggaggtcgtcgcatcggcctcgccctcgcatggcatttcattaatcaaaagcaaccggtgattgtcagctatcggacacactatccagccattgatggactgattaatgcaggtgcgcagtgtattcaggctgattttagcaccaacgacggtgtgatggcgtttgccgatgaagtactaaaaagcacccatggtctgcgtgctattttgcataacgccagtgcgtggatggcggaaaaaccgggtgcgccactggccgacgtactggcttgcatgatgcagatccacgttaataccccatacctgctcaaccatgcgctggaaagattactgcgtgggcacggacacgccgccagcgatatcattcactttaccgattatgtggtggagcgcggtagcgacaaacatattgcgtatgctgcaagcaaagcggcactggataatatgacccgcagctttgcccgcaagctggcaccggaagtgaaagtgaattctattgcgccaagcctgatcctgtttaatgaacatgatgatgccgaatatcgacaacaggcgctgaataaaagtctgatgaaaaccgcgcctggcgagaaagaagtgatcgacctggtcgattacttacttaccagttgctttgtcaccggacgcagtttcccacttgatggcggtcgtcatctgcgttaatgcagctttatccagcatataatcaacacccatgcgcttatcccccaacacgcaacagaaccaacaaaagcggcgggcaagcgcatcattccggtgaaataccacaggctcaccaggtaaacaaaatagggaataatgctccacatactaaaaatgatggttgcgcgtaaggcttcaatgccgcgttcgctggcaacaatataatgcgcgataagcgcaaaggtcgggaaaagtggaatcagcccggcgatataataatttttcgtttttgctaaaacaccaatcaacagcactaccagcgcaccgagcgcggctttgattaccagccccatctttttaccttaacacttccataacaagtcatcagtagaatacctgatgaaaacttgtttagaaacgattgatagtaagtaaaaacagcgcggtgtattgtgacgtttttatatctaccgtgaatgttatgaacactatcgtatttgtggaagatgatgcggaagtcggtagtctgattgccgcgtacctggcaaaacatgatatgcaggttaccgtagagccgcgcggcgaccaggccgaagaaaccattttgcgagaaaatccggatttggtgttactcgacatcatgctaccaggcaaggacggcatgaccatttgtcgtgatttacgcgcaaagtggtctggaccgattgttcttctaacctctctcgatagcgatatgaaccacatcctggcactggaaatgggtgcctgcgactatattctcaaaacgacgccccctgctgttttgctagcgcgtttacgtttgcatttgcgtcagaatgagcaagccacactgaccaaaggtcttcaggaaacgtctctgactccctacaaagccctgcatttcggcacgttgaccatcgatcccatcaaccgcgtagtcaccctggctaacactgaaatcagcctcagcacagctgatttcgaattattgtgggaattagctacccatgccgggcaaatcatggaccgcgatgcattgctgaaaaatttacgcggcgtcagttatgacggactggatcgtagcgtggacgtggctattagccggttaagaaaaaaactgctcgataacgccgcagaaccttatcgcattaaaactgtgcgtaacaaaggctatctttttgcgcctcatgcatgggaataagcgatgaaaaaactgtttatccagttttacctgttattgtttgtctgcttccttgtgatgtctctgctggttgggctggtgtacaaatttaccgccgaacgcgcgggcaaacagagcctggatgatttgatgaacagtagcctgtatctgatgcgcagcgaattgcgtgagatccccccacacgactggggtaaaactctgaaagagatggatttaaatctctctttcgatctgcgtgtcgagccactgagtaaataccatcttgatgatatttccatgcaccgactgcgtggcggcgaaattgtcgccctggacgatcagtacacgtttttgcagcgtatcccgcgcagccactacgtgctggcagttggtcctgttccttatctttattatctccatcagatgcgattgctggatatcgccctgatcgcttttattgctatttccctcgcctttccggtgtttatctggatgcgtccgcactggcaggatatgttaaaactggaagcagcggcgcaacgatttggcgatgggcatctcaatgaacgtatccactttgatgagggtagcagctttgaacgacttggcgtcgcatttaaccagatggcggacaatatcaacgccttaattgccagcaaaaaacagcttattgacggtatcgctcacgaactgcgaacaccgttagtgcgcctgcgttatcgactggagatgagcgataacctgagcgccgccgaatcccaggcgttgaatcgtgatatcagtcaacttgaagctttaattgaagagctgctgacttatgcccgactcgatcgcccacaaaacgagcttcatcttagcgaaccagacctgccgttgtggctgagtacgcatctggcagatattcaggcagtaacgcccgataaaacggtacggataaaaacgctcgtgcaaggccattatgcggcgttggatatgcgcttaatggagcgcgtgctggataatttgctcaataacgccctgcggtactgccatagtacggttgaaaccagcctgctactgagcgggaatagagcgacattaattgttgaggatgatggcccagggattgccccagaaaaccgcgaacatatctttgaaccttttgttcgcctcgatcccagccgggatcgcagtaccggcggctgcgggctggggctggcaattgtccactctatagcactggcaatgggcggtacggttaattgtgacaccagcgaactgggtggtgcccgcttcagctttagctggccgttatggcataacatcccgcaatttacctctgcctgacactacgcgcacgatggtcaagtcaccacgactgtgctataaaataagtatgttgtaactaaagtggttaatattatggcgcgttacgatctcgtagaccgactcaacactacctttcgccagatggaacaagagctggccatatttgccgctcatcttgagcaacacaagctattggttgcccgcgtgttctctttgccggaggtaaaaaaagaggatgagcataatccgcttaatcgtattgaggtaaaacaacatctcggcaacgacgcgcagagcctggcgttgcgtcatttccgccatttatttattcaacaacagtccgaaaatcgcagcagcaaggccgctgtccgtctgcctggcgtgttgtgttaccaggtcgataaccttagccaagcagcgttggtcagtcatattcagcacatcaataaactcaagaccacgttcgagcatatcgtcacggttgaaagtgaactccccaccgcggcacgttttgaatgggtgcatcgtcatttgccggggctgatcacccttaatgcttaccgcacgctcaccgttctgcacgaccccgccactttacgctttggttgggctaataaacatatcattaagaatttacatcgtgatgaagtcctggcacagctggaaaaaagcctgaaaagtccacgcagtgtcgcaccgtggacgcgcgaggagtggcaaagaaaactggagcgagagtatcaggatatcgctgccctgccacagaacgcgaagttaaaaatcaaacgtccggtgaaggtgcagccgattgcccgcgtctggtacaaaggagatcaaaaacaagtccaacacgcctgccctacaccactgattgcactgattaatcgggataatggcgcgggcgtgccggacgttggtgagttgttaaattacgatgccgacaatgtgcagcaccgttataaacctcaggcgcagccgcttcgtttgatcattccacggctgcacctgtatgttgcagattaacgcccggctttcatactgccgaccatctgttctggccgtacccagctgtcaaactcggcttcgctaagataccccagcgcaagggccgcagcttttaaggtcagcccttctttatgcgcttttttggcgatctcggcggctttgtcataaccaatgtgggtgttaagcgcagtcaccagcatcaggctttcattgagtaattgattgattcgctcacgattcggttcaatacccactgcgcagtgtttgttaaaactttccatgccatctgccagcaagcgcacgctttgcaggaaattgtggatcaccattggacggaagacgttcagttcaaagttaccggaagcgccccccatgttgatcgccacgtcgttccccatcacctgacagcagagcatggttaatgcctcacactgtgttgggttcactttccccggcatgatactgctgcccggctcattttccgggatactgatttcaccaattccgcagcgcgggccagaggccagccagcggacatcattggcgattttcatcagactcgcagccaaccctttcaacgcgccgtgcgcctgaaccagggcatcacaggtcgccagcgcttcaaatttgttcggcgcggtaacaaacggtgcacaggtaatgactgccagttcatctgctacgcgacgcgcatactccggatgggtatttagtccagtacccaccgctgtaccgccaagagccagttccgctacgtgaggcaggctgtattcgatatgtttgagattatgctcgagcatcgctacccagccggaaatctcctgccccagcgttaacggcgtggcatcctgcaagtgagtacgaccaattttgacgatatcggcaaaagcacgggatttctcattcagtgtctgtgtcagggttttaagctgaggaatgagttgcttgcgcagcgccagcagcgccgcaacgtgcatcgccgtcggaaagacatcgttggaactttggcttttgttcacgtcgtcgttagggtgaactttacgttccatcccgcgcacaccgccgagtaattcactggcccggttagccagcacttcgttcatgttcatgttactttgcgtgccggagccggtctgccagatagccagcgggaattcgtcgtcatgctgtcctgccagtacttcatccgccgcctgacgaatggcgctcgctttctcttcagacaacaagcctaaatcttcattaacttttgccgctgcacgcttggttagcgccagcgcatgaatcagactggtgggcattttctccgtgctaatgcggaaatgctccaggctgcgttgagtttgtgcgccccacagcttatctgccgggacatcaatcgcccccatgctatctttttcgctgcgtactgtattcatgacctgctcctcacctgattaattttttctttctgttttgctttcgttaagcaacttttagctcacttattatttaccatttgataacaaatgtttggtctttcgtgccatgtaaaaaaaccgccccgaagggcggctctgtttatttcacacagcgggtgcattgtgtgagttgtatctgctggaagaagtcatttcctttatcatccacaaggataaacgccgggaaatcttccacttcaattttccagatggcttccattcccagttccggatattcaacacattccaggctcttaatacttccctgcgccaatacagcggccggaccaccgatactgccaaggtagaagccgccgtgttttttacaggcatccgtcacctgctggctgcggttgcctttcgccagcatgatcatacttccgccctgcgcttgcagttgatcgacataagaatccatccgtccggcggtcgttgggccaagagaaccggaggcataaccttccggcgttttggccggacccgcgtagtaaatcggatgatctttgatgtactgcggcagcccttcaccgttatccatccgctctttcagtttggcgtgagcaatatcacgaccgacgataatcgtgccgttaaggcttaagcgtgtagaaacgggatactggctcaactgtgcgaggatctctttcatcggacggttaaggtcaacgcgcaccgcttcgccttctcccgctttgcgcagctcttccgggatatatttgcctggattatgttccagtttttcgatccagatcccctgacggttgatcttcgctttgatattacggtcagcagagcaggagacgcccataccgaccgggcaggatgcgccgtgacgtggcaggcgaatcacgcggatgtcgtgagcgaagtatttaccaccaaactgcgcacccagaccaagattttgcgcttcgatcagcaattctttttccagttccacatcgcggaacgcctgaccgtgctcattcccttccgttggcagttcatcatagtatttcgcggaagccagtttcaccgttttaaggttcgtttctgcagaagttccaccaataacgaacgcaatatgatacggaggacaggccgccgtacccagcgtgcgcatcttctcaaccaggtaatttttcagtttccccggcgtcagtaacgctttggtttcctgatagagatacgtcttgtttgcgctaccaccacctttggcgatacagaggaatttgtattcgtcgccatcaacggcataaagatcgatctgcgctggcagattggtgccggtattcacttctttatacatatccagcggcgcgttttggctgtagcgcagattatcttcgatataagtgttatagacaccgcgcgccagcgccgcttcatcaccaccaccggtccatacacgctgcccttttttaccaacaataatcgcggtgccggtatcctgacaggttggcagaacgcctttcgccgcgatgtcggagttacgcaggaattgcagcgccacatatttatcattttcgctggcctccgggtcacgcagaatgtcggccacctgttgttggtgcgccggacgcagcatgaagctcgcatcatgaaacgcctggcgcgccaacagagttaacgcttcgggtgcgactttcaaaatctcctgcccttcaaattcagatacgctaacgtgttcgctggttagcaggtaatactcagtatcatcttttttgagtggaaaaggagcctgataatgaaagggtttgttactcattgttctctcacttactgcctggtttggttatgctctgggcgggtgttccgttgccctgttaaaagcgagtaacaatatcctacacacttttttaacaaaaactgagactagtacgactttttgcggctccaggttacttcccgtaggattcttgctttaatagtgggattaatttccacattaaaacagggattgatcatgcaaaaactcattaacagtgtgcaaaactatgcctggggcagcaaaacggcgttgactgaactttatggtatggaaaatccgtccagccagccgatggccgagctgtggatgggcgcacatccgaaaagcagtagtcgagtgcagaatgccgccggagatatcgttagtctgcgtgatgtgattgagagtgataaaagcactctgctcggagaggccgttgccaaacgctttggcgaactgcctttcctgttcaaagtattatgcgcagcacagccactctccattcaggttcatccaaacaaacacaattctgaaatcggttttgccaaagaaaatgccgcaggtatcccgatggatgccgccgagcgtaactataaagatcctaaccacaagccggagctggtttttgcgctgacgcctttccttgcgatgaacgcgtttcgtgaattttccgagattgtctccctactccagccggtcgcaggtgcacatccggcgattgctcactttttacaacagcctgatgccgaacgtttaagcgaactgttcgccagcctgttgaatatgcagggtgaagaaaaatcccgcgcgctggcgattttaaaaagcgccctcgatagccagcagggtgaaccgtggcaaacgattcgtttaatttctgaattttacccggaagacagcggtctgttctccccgctattgctgaatgtggtgaaattgaaccctggcgaagcgatgttcctgttcgctgaaacaccgcacgcttacctgcaaggcgtggcgctggaagtgatggcaaactccgataacgtgctgcgtgcgggtctgacgcctaaatacattgatattccggaactggttgccaatgtgaaattcgaagccaaaccggctaaccagttgttgacccagccggtgaaacaaggtgcagaactggacttcccgattccagtggatgattttgccttcagcctgcatgaccttagtgataaagaaaccaccattagccagcagagtgccgccattttgttctgcgtcgaaggcgatgcaacgttgtggaaaggttctcagcagttacagcttaaaccgggtgaaagtgcgtttattgccgccaacgaaagtccggtgactgtcaaaggccacggccgtttagcgcgtgtttacaacaagctgtaagagcttactgaaaaaattaacatctcttgctaagcttattaaaggcttataacaccttcaggcggccagtccgcctgatttcattttatggataatcattatgaataaaagcctggtagcggtaggcgtcattgttgcgctaggcgtagtctggacaggcggcgcatggtatacaggcaagaagattgaaacccatctcgaagacatggtcgcgcaggcgaacgcgcaactcaaactgacagctcctgaatccaacctggaagtgagttatcaaaactatcatcgcggcgtattcagcagccagttgcaactgttggtgaaacccattgccgggaaagaaaatccgtggattaaaagcggtcagagcgtcatcttcaacgaaagcgttgatcatggtcccttcccgcttgcccagcttaaaaaactgaacctgatcccgagcatggcaagtattcaaaccacgctggttaataacgaagtaagcaaaccactgtttgatatggcaaaaggtgaaacgccttttgagattaacagccgcattggttacagcggtgattccagttccgatattagcctcaagccactgaattacgagcaaaaggatgaaaaagtcgcctttagcggcggcgagttccagttaaatgctgacagagacggcaaagccatctccctttccggggaggcgcaaagtggtcggatagacgcagttaacgaatacaaccagaaagtgcagttgacctttaataatctgaaaaccgacggttccagcacgctggcaagttttggtgagcgtgtaggaaatcaaaaactgagtctggaaaaaatgaccattagtgtggaaggcaaagaactggcactgctggaaggcatggagatcagcggtaaaagcgatctggtcaatgacggtaaaacgatcaatagccaactggattacagcctaaacagcctgaaggtacagaatcaggatctgggcagcggcaagctgactttaaaagtcggccagattgatggtgaagcctggcatcagtttagccagcaatataacgcgcaaactcaggcgctgctggcacagccagaaattgccaacaaccccgaactttatcaggagaaagtgacggaagccttctttagcgccctgccgctgatgctgaaaggcgatccggtgattactatcgcgccgctaagctggaaaaacagtcagggtgaaagtgccctgaatctgagcctgttcctgaaagatccggcaacgactaaagaagcgccgcaaacgctggcgcaggaagtagatcgtagcgttaaatctctggatgcgaaactgaccattccggtggatatggcaactgagtttatgactcaggtagcgaagctggaaggttatcaggaagatcaagcgaaaaaactggcgaaacagcaagttgaaggtgcaagtgcaatggggcagatgttccgtctgaccaccttgcaggacaataccatcaccaccagcctgcaatatgctaacggtcagataacgttaaatgggcagaaaatgagcttagaagattttgttggcatgtttgcgatgccagctcttaacgttccggctgtaccggcaattccgcagcagtaattcacggccaaaacgccggagaattttcactccggcgttttcatctgaaaacaaaccagagattgcctgatgcgctacgcttatcaggcctaccttttcctgcaacactttgaatttatgagtttttgtaggctggataaggcgtttacgccgcatccggcataaaaaacgcgcactttgtcaacaatctgaaacgccggagatttttctctccggcgttattttttacttcagcataaagtcatactgaatactcattttcacatcccagtaattcaggcgatcgcccagcgtactgccatcgcgcttttcccgccctttatcggcagcaagaaagaaattcatcccttgtaacggcccttcgctgacccgatagttcataccacctaagatacccgtgccttcaatccgcacatctcgtttactggattcatagccgcgagtcacaatcggtgcaaatgtcagcgtaaattgcggcgttaaacgatagttgacgcccaattgccaggactgcattccttcacggttacgatcaagacttaaactaaagggatagccaatgtcggtatccaccacggcaccattcattgcatggcgcaaataaccaccactgccaaatacacttccccacggcgcattccaggtcaattgtccactaaccaacgccgtttcattgggctggctggtattacgacttaaaccttcgagctgcgcgtaaaagccgagcaactcccctttcaacgtataattcgggtcgagcggtatgcttttctcgagaatactttgtatctgattggaaacatctttctgtacgcttgcccccagagaatagcgactggtatcatcatgccaactggcggctaaaaaagaacgtgcgcgatgtttatcgtattttcccgtctggctgttatacaccccttcatcacgaataccggttgtactatcagtccataaaaatactcgactacgccacattccccacagatcaatatttggtgttaaagcccaataacctaatgctccttcagaaactgtcggtaatgtacgttggctactgccagccattaacggaatacgataaggtaagctaccataactataatccgtcccgaagcgacctaatttaagcaggctattttcactgggttttatttttactgcccccagggcaaagccaaaacttttatcaccatcaagataccaccgggtactcatatcagcacgagcacctaatttataaacataatacgccccgccttcaacgccaataatattggaataataaccactattgaaatcgagcaatcctccctgtacccatgcgtaaatatctcttcccgcgccagcactgggcttatccgccctgcgcaattcgtttttcagtctgatgcgtagtcccgcttcatcgtcagccagttgcgccgcataagcagaggtaaggccagaggcagccgtcaggcaaataacggccatggccactatttttctcatagttgcacctttgatgttctgattatttttattgaatattaattagtgatatcgctgattaattgctgctgcacttttttacgattatcaatttcaaccacgatttctttgaattttttatccgtgagcggataaaaccagataataacgaatgccagtagcataaatccgcaaggtactaaggcaatacttgtgcggatgcccataataacttccggcgtttgcacctgattggcgatatatccgcttaaccccaaaataaaggcaggaatactacctccgattgcctgaccgcatttacgggtaaaactgaatagactataggtgagcccttcaattcgcacgccggtcaggtattcaccgtattctacggtatcagcttccagcgcccacatcacggtcatggtaacgccctgaccaatactagcgatggccaacgcaaccaacgccaccggcagactccagacggaaacccagaagaacagcagataaccgcaggttcccagcaaagcgccaatcaggaaggtattctttttaccgatcctcgcgaccatccccggcaccagcggtgcgcttgccacagtaccaaccaggttttgcaccagtaccagcacagtgaacagcccggtatcatttaacacatagcgcacgtagaacaagctgctggcgctgaccgcaaaggtgctaatcagcacacacagcgcaccgatgcacaacataaacagcgggcgattccgtttcagggtttgcagactgatattcaaactcggctgcgcaacgatacgtaccacattctcacgcgtgcttttgaagcagatgaagtaaagcaccattccggcaatcgccagcacaattgtccagaaatggtatacgctcaccatctcttccgggctggagttcttaatgctcggtcctatcagaaatgccaggcagacaaaggtcaaactagcggcaatcccacgagccgcgcccagacgggcgcgggattgtggttgttgggtcatcgcggtagcaagactaccataaggaatattcaccaggctgtagcaaagcccgaggcccatgtaggtcaaatatgcatacaccactttgctaccatggctccagtcggtcagcacccagaataccagcacgctgaagatcattaacggcgcagtaccgaagagtaaaaacgggcggaattttccccagcgggtattcacactgtccaccactcgtccggcaaagacgtcggcgaaggcatcgaatacccgcaccagtaacagcatggtgcccgccgcagcggcaccgacgccagcgacgtcggtgtagtaactcaacaggaagagcgcccccattgcgaaggcgaagttattggcgacgtcaccgaggctgtagccgacgatggtgcgccaggagagttgttgattcattgtttgcctccctgctgcggtttttcaccgaagttcatgccagtccagcgtttttgcagcagaaaagccgcgctcttcggtttgcggtcgcgagtgaagatccctttcttgttaccgccaacgcgcaatatgccttggctggtcgcaaaatcggcgaaattccatacctgttcaccgacgacggcgctgacgcgatcaaagacgcggtgatacatatccagccatgcacactgatactcttcactccacatgtcggtgtacatactgtgcagcccggctaacgtatccacgccgtattcggtgatgataatcggctgatgcagtttctcctgccaggccagaagttctttttccagtaccttctctgccgtttccaaatcgccgctttggacataccatccgtaataacggttcaggcacagcacatcaaagagatcgctgatggtatcggtgtgagcgtcgcagaacattacattgacgcaggtgatcggacgcgtcgggtcgagtttacgcgttgcttccgccagtggcgcgaaatattcccgtgcaccttgcggacgggtatccggttcgttggcaatactccacatcaccacgcttgggtggtttttgtcacgcgctatcagctctttaatcgcctgtaagtgcgcttgctgagtttccccgttgactgcctcttcgctgtacagttctttcggcttgttgcccgcttcgaaaccaatgcctaaagagaggttaaagccgacagcagcagtttcatcaatcaccacgatgccatgttcatctgcccagtcgagcatctcttcagcgtaagggtaatggctggtacggtaggagttggccccaatccagtccattaatgcgtggtcgtgcaccatcagcacgttatcgaatcctttgccacgcaagtccgcatcttcatgacgaccaaagccagtaaagtagaacggtttgtggttaatcaggaactgttcgcccttcactgccacactccggatgccgacgcgaagcgggtagatatcacactctgtctggcttttggctgtgacgcacagttcatagagataaccttcacccggttgccagaggtgcggattcaccacttgcaaagtcccgctagtgccttgtccagttgcaaccacctgttgatccgcatcacgcagttcaacgctgacatcaccattggccaccacctgccagtcaacagacgcgtggttacagtcttgcgcgacatgcgtcaccacggtgatatcgtccacccaggtgttcggcgtggtgtagagcattacgctgcgatggatcccggcatagttaaagaaatcatggaagtaagactgctttttcttgccgttttcgtcggtaatcaccattcccggcgggatagtctgccagttcagttcgttgttcacacaaacggtgatacgtacacttttcccggcaataacatacggcgtgacatcggcttcaaatggcgtatagccgccctgatgctccatcacttcctgattattgacccacactttgccgtaatgagtgaccgcatcgaaacgcagcacgatacgctggcctgcccaacctttcggtataaagacttcgcgctgataccagacgttgcccgcataattacgaatatctgcatcggcgaactgatcgttaaaactgcctggcacagcaattgcccggctttcttgtaacgcgctttcccaccaacgctgatcaattccacagttttcgcgatccagactgaatgcccacaggccgtcgagttttttgatttcacgggttggggtttctacaggacgtaacataagggactcctcattaagataataatactggtcaacctttaatctgattagttaaccaattctgtgttgcacacagttatctgtgagaaacccatggaagagaaatggaaataaaaagaactgacaccgcgatcaaaaaaccaaaaactgcaatacccacagcgtgatatagatcgcattaatctttaaaacagcgttgacagaagccataaaataagcaaccgaacgttcgttcgagcgtattgggaacgataaactctcatgacatatggctacagtgaatattttggggggaattctccgaagccgggaaggataatttttgcacagagaaattacgatatgaaacgcgggcacagttatcaccagcccgccgaaaaagagagagaatcaggatgcggttaagataccgccaatcatcgcgcgtaatccctgagcaaagctcgcttcacgcgccaggtcttccgcttcgatatcggccagtacaccgtaggtcagatccagcagtaaacgactagtcattgccgtgttgatgtctgggcttatctcgcctttttgctgggcatcacgcatccgctgggcaacaaattccgtgatcgtcatatgcttatttttaagcatggcggcgacctgtgggttacgcatcccttccgccataatttcaaccaccagcgcccgttgtccaaaggcttcatgggtgagagagacaatggactcgaccatatagtcaacgaaatgaatcccttcaatcggttcccggaaacgggccagcgccctctcctggtcctgtaagataatcgcctgaatcaaggcttctttggagatgaaatggtgatagagcgtcccgggactaatggcgcaagatttacagatggctttcatgctggcactgtgaaatccattttcactaaaaatctctctggcagcattgaggatccgggtccgtgtcggttgtgcttcagtctgcatgttatccatcattaaaccattatagttagcgtgaataactagtttaccgcgttgtcaggtgagcgcctatcattgctgttgaatagtgcgaaggcacactctattcgtatacttttcactctgaaattggttaaccaatagccgtgatttggctgccagttatttagcagagacgttgatgagtttatcccggtaaacaacacgcacggttgtttaccggtccgttagtgtattaattgagctcctgtaccccaccaccggagacggtgagaatttgtccgcttacccagctcgcagcagggctgcaaaggaacagcgctgcgttagcaatatcttgcggttggcccagacgtctgatcggcgtgtgctgtaacattttttgttcaatttctggtgtaataacggatttcagggcatcggttaatattgcccccggcgcaatgccatttacccgaatatttttttcacccaggtcaaacgccatatttctgaccagatgactggccgcagctttagaacttgcataggaagtcatgtttatatttttattttctgccgccatagaagtgatggtcagaataacgccaccgccatttttttccatttctggcgcaacaagttgactcagatggaaaaaagaaaacacattcagttcataagcacggcgaaaatccgccattggcatatcaaacggtttaggtccaccgccaccggcgttgttaaccagaatatcaactttacccagcttactgatagcaaagtctgccagtgcagagagttcctgttcggaagtaatatcacaacggcaggcaaatgcctgaccacccagttgttgaatttcgtctacaacatggttagctgcgtcggcgttaatatcactgaccaccacagatgcgccagctgtcgcgaatgtaatggcgatttctttaccaatacctgcacccgcacctgtgatgatggcgcattttccgtcgagtctcaggttgtcagaattaaacacataaacctcctgtgaacttcagtaaaaataaaaggcaccgcctgtgtgccacattttttatcattaaccttgaggaaaggacactaccaggtatagcagataaagagaggattatttcgctgcaatgagccgggcgggaataataagattgcgactatgcgtctcttcatgggtgattttttgcatcatgcgatccgcaagtgtgataccaagttcccgcgctggcgtgctggcccaggtaacaggtatatcatcaagtgtggttggtgtcgcatcggtaaatgccgccaggctaacctgttgctcaaagtaacgatcgactccgctttccccgctttgccgccctgctttgagcaaaccaaaccatgcccccatcgcaatagtttcgttatagcaaaccacggcactgatggtcgggttatgacgtaaaagcgccgtgatagcttccgcggcttgcttctggctggaagtgcactccaacacccaatcgctatgaaacggcaggccaaattttagtagagttgcacaatagcccccaacccgttctgcacgggttaaactggaactttgccctcccagccaggcgatccgctgatgcccattgcgaatgagatgctccgtcaacaactgtgcagcctgcatgttgtccgggcgaaccgtatcaacatcatcaagataactggcacgggaagcgaaaatcaccgggatagctttttcttctgccatccgtcgcaggtcatcgctacttcctgcagctccggcaattaccacaccatcgacaccctgattcagtaacagactaaaccgctgtgccagctgctcaccgtctttaccgccgtgaagcaaaaaaaccatccgtccctgcgcttccagagcttccgtcaatccggccgtcaattcggcgtaaaacggcgcagataaatcacggacgatcaaaccaatgacgccgctttgcccgccgcgcagcgcgctcgcctggcgattgcgcacaaatcccagctcttcaatggcggcgttaacgcgttctcctgtggcggtagagattcgccctttgccactaagcaccaggctaacggtacttacgctcacgcccgcagccagcgcaacatcatgaatggttatttttttggcggtagccatgcagatgacctactccctgattatgtgacagataaaacgttttaccttttatttatcttatacccgctattatcgttgcgtaatgtgatttatgcctcactaaaatttgataaaacgttttatcttctcgcgcaatttactgaatccagattgttctctacgaggagtcgttttatgacggcgaaaacagcaccgaaagtcacgctgtgggagttcttccagcagttaggcaaaaccttcatgttacccgtggcattattgagcttctgcggcattatgctcggcattggtagttctcttagcagccatgatgtcataaccctgatcccggtcctgggcaaccccgtgttgcaggctatctttacctggatgagtaagattggcagctttgcttttagtttcctgcctgtcatgttctgtatcgccatcccgctgggcctggcacgcgaaaataaaggcgtagcggcattcgctggcttcatcggttatgcggtaatgaacctcgcggtaaacttctggttgaccaataaaggcattctgccaaccacggatgccgcggttctgaaagccaataacatccagagcattcttgggatccagagcatcgataccgggatcctcggtgcggtgatcgccggtattatcgtctggatgctgcatgagcgtttccataatatccgcctgccggatgcgctggcattcttcggcggtacgcgcttcgtaccaattatctccagcctggtgatgggccttgtcggcctggtgattccattagtctggccgattttcgccatgggtattagcggcttgggccatatgataaacagcgcgggtgatttcggaccgatgctgtttggtaccggtgaacgtctgctgttgccgtttggtctgcatcacattctggtggcattaattcgctttaccgacgcaggcggcacgcaggaagtctgcggtcaaaccgtcagcggcgcactgaccatcttccaggcgcaattgagttgcccgaccactcacggtttttctgaaagcgccacgcgtttccttagccaaggtaaaatgcctgcgtttctcggcggtctgccaggtgcagcgttagctatgtatcactgcgcgcgcccggaaaatcgccataaaattaaaggtctgctgatttctggcctgatcgcctgcgtcgttggcggcactaccgaaccgctggaattcctgttcctgttcgtagcgccagttctgtatgtcatccacgcgctgttaaccggcctcggcttcaccgtcatgtctgtgctcggcgtcaccatcggtaataccgacggcaatatcatcgacttcgtggtgttcggtattttgcatggtctgagtaccaagtggtacatggtgccagtggtggcggcaatctggtttgtcgtttactacgtcatcttccgtttcgctatcacccgcttcaatctgaaaaccccggggcgcgatagcgaagttgccagcagtatcgaaaaagccgttgccggtgcgccgggtaaaagtggttacaacgttcctgcaatcctcgaagcattaggcggtgccgacaatattgtcagcctcgataactgcattacccgtctgcgtttgtctgtgaaagatatgagccttgttaatgtgcaggcactgaaggacaatcgggcaattggcgtagtacaacttaatcaacataacctgcaggttgttatcgggccacaagttcagagtgtaaaagatgaaatggccggtctgatgcatactgtccaggcataaggataagatatgttcgattttagtaaggtcgtggatcgtcatggcacatggtgtacacagtgggattatgtcgctgaccgtttcggcactgctgacctgttaccgttcacgattagtgacatggattttgccactgccccctgcattatcgaggcgctgaatcagcgcctgatgcacggcgtatttggctacagccgctggaaaaacgatgagtttctcgcggctattgcccactggttttccacccagcattacaccgccatcgattctcagacggtggtgtatggcccttctgtcatctatatggttagtaaactgattcgtcagtggtctgaaacaggtgaaggcgtggtgatccacacacccgcctatgacgcattttacaaggccattgaaggtaaccagcgcacagtaatgcccgttgctttagagaagcaggctgatggttggttttgcgatatgggcaagttggaagccgtgttggcgaaaccagaatgtaaaattatgctcctgtgtagcccacagaatcctaccgggaaagtgtggacgtgcgatgagctggagatcatggctgacctgtgcgagcgtcatggtgtgcgggttatttccgatgaaatccatatggatatggtttggggcgagcagccgcatattccctggagtaatgtggctcgcggagactgggcgttgctaacgagcggcagcaaaagtttcaatattcccgccctgaccggtgcttacgggattatagaaaatagcagtagccgcgatgcctatttaagcgcactgaaaggccgtgatgggctttcttcccctagcgtactggcgttaactgcccatatcgccgcctatcagcaaggcgcgccgtggctggatgccttacgcatctatctgaaagataacctgacgtatatcgcagataaaatgaacgccgcgtttcctgaactcaactggcagatcccacaatccacttatctggcatggcttgatttacgtccgttgaatattgacgacaacgcgttgcaaaaagcacttatcgaacaagaaaaagtcgcgatcatgccggggtatacctacggtgaagaaggtcgtggttttgtccgtctcaatgccggctgcccacgtagcaaactggaaaaaggtgtggctggattaattaacgccatccgcgctgttcgttaaccccaattgcgcaacgtaaaaaatcgttgcgcaatcgtggatttttaccctgctttgtttttataatggtgcgcacttttatatccagaaaaagagtgcgaccatgattgataccaccctgccattaactgatatccatcgccaccttgatggcaacattcgtccccagaccattcttgaacttggccgccagtataatatcagccttcctgcacaatccctggaaacactgattccccacgttcaggtcattgccaacgaacccgatctggtgagctttctgaccaaacttgactggggcgttaaagttctcgcctctcttgatgcctgtcgccgcgtggcatttgaaaacattgaagatgcagcccgtcacggcctgcactatgtcgagctgcgttttagtccaggctacatggcaatggcacatcagctgcctgtagcgggtgttgtcgaagcggtgatcgatggcgtacgtgaaggttgccgcacctttggtgtgcaggcgaagcttatcggcattatgagccggaccttcggcgaagccgcctgtcagcaagagctggaggcctttttagcccaccgtgaccagattaccgcacttgatttagccggtgatgaacttggtttcccgggaagtctgttcctttctcacttcaaccgcgcgcgtgatgcgggctggcatattaccgtccatgcaggcgaagctgccgggccggaaagcatctggcaggcgattcgtgaactgggtgcggagcgtattggacatggcgtaaaagccattgaagatcgggcgctgatggattttctcgccgagcaacaaattggtattgaatcctgtctgacctccaatattcagaccagcaccgtagcagagctggctgcacatccgctgaaaacgttccttgagcatggcattcgtgccagcattaacactgacgatcccggcgtacagggagtggatatcattcacgaatataccgttgccgcgccagctgctgggttatcccgcgagcaaatccgccaggcacagattaatggtctggaaatggctttcctcagcgctgaggaaaaacgcgcactgcgagaaaaagtcgccgcgaagtaacaaaatggatggtgcaaatgcaccatccatttttcatgcaaggcacaaagtcgcgcgatgtttggcggattcgatgcccagctcaatcaactccattacctggattgcctggcttgccggaaccggattttcaccatcgccatttaacgcatcacgaatagccgcatagtaagccggataattcccaggcaccgtcaacagcgtttcttcgacacgttcctcaccttccacgcgggtaagtacgccatcacgcatatcgtagccccagtcttcctgcggtagacgctcgccatttttcagacgttcttcctgtggatcgaggccatatttcacataactgcctcgggatccatgcacgatataccgtgcactctcagcggctgccagcatggtaccgtgtaaaatgactcgccgctgtggataggacaagatggcgtggaaataatcggtgctctgcgctccgggccgtaactgtgccaaatctaccgtcatgctgaccggtaaaccaaaaagcgtaatggcctgatcaagaagatgtggtgctaaatcgtaccagataccgctgcctgggccgccctgttcacgccaacgatcgcgcacctgcggacggaagcggtcaaaatgagactcaaagtaagcaacttcacccagcacgccttccgcgagtaaaccttttagcgtcaagaaatcgctatcccagcgacggttatggaatacagacagcacacgccccaggctttttgccagcgcatccagctctcgcgcttgactcagtgtcacggtaaagggtttatcaacgaccacatgtttacccgcctcaagcgccgctttggctaacgggaaatgggtatcgttgggtgtaggaatgacaatcaggtctatgttgggatcgttaaacagatgcttcggctcagagacaaccgtaaccgttggccagtcggcttttacttttgtttcatcactgctggagattaccgccagttcctgcccgggcgtgcccgcaatcaggggcgcatggaaggttttgctcgcataaccatacccaatcaacccaacacggatgttgtcgctcatgtcattgcctctcattgaagtatgatggctatttgacactatcctttacccacgctcaacagtttaataacctgccagcaataagggatgttgtttaacttaagtcaaaaaaatagcgaattttccaacgacaaaagctaaatatcgcaaaaacctcagtaaaaatcttgctggagctattattgctaagtaacatttaccccctgaagttaatggatcaatcaagagagatgtgggctgtaatgaatcgtcttattgaattaacaggttggatcgttcttgtcgttagtgtcattcttcttggcgtggcgagtcacattgacaactatcagccacctgaacagagtgctagcgtacaacacaagtaagctctgcacttgtggagcgacatgctgcccgtccgggtgcatgttttcacttgtcggatattaaaccaggaatttattatcttgttcgatgttgttggtgattgtcagggatagtaaagcgcgttactcttttcagagcagtttttcatccctgaatatttgccatcagcgcattcttattattgtaataacacaagcgttcacttttggtgaaattttatcatcactaataatacctacccctttggtattaattattttatggaccttttatgactgttcaggactacttattaaaatttcgcaaaatcagtagtctcgaaagtctggaaaaactctacgaccatcttaattacaccctgacggacgatcaggaactgatcaatatgtatcgtgctgccgatcaccgtcgcgcagagctggtttctggcgggcgtttgtttgacctcggccaggtaccgaagtccgtctggcactatgtccaataaagaaagtagcgatcggttataaaagccttataataacgcccctaaaattagatttgcctgtttgcgtcgctattctggagaacctatgaccaccacaacgccacaacgtattggaggctggttgcttggcccgttggcctggcttttagtcgctctgttgagtacgacgctggcgttgttgctgtataccgctgcgttatcttctccgcaaacatttcaaacgctcggcggacaagcactgacgacacaaatcttatggggcgtttcttttattaccgctatcgccttgtggtattacacactgtggttgaccatcgctttctttaaacgtcggcgttgtgttcctaaacactatattatctggctgcttatttccgtattgctggcagtaaaagcattcgcttttagtcccgtggaagatggcatagccgttcgccagttgctgtttactttgttggcaaccgcattgatcgtcccctatttcaaacgcagcagccgggtaaaagcgacgtttgtgaatccgtaataaccttacagttaacctgttgtcgcctgctctggattaacggataataggcggcttttttatttcaggccgaaaaatgactgactacctgttactgtttgtcggaactgtactggtcaataactttgtactggtcaagtttctcggtctctgtccgtttatgggggtttccaaaaaactggaaaccgcgatgggcatggggctggcaacaacgtttgtgatgacgctggcgtctatttgcgcctggcttatcgatacgtggattttgatcccacttaatctgatttacctgcgcaccctggcatttattctggtgattgctgtggtcgtgcagttcaccgagatggtggtgcgcaaaaccagcccggtgctttaccgtctgctggggatttttttgccgcttatcaccaccaactgtgcagtgctcggcgtggcgttgctgaatatcaatctcgggcacaatttcttgcagagcgcgctgtacggtttttccgccgctgtcggtttcagcctggtgatggtgctcttcgccgccatccgcgaacgccttgctgtggctgatgtcccggcaccttttcgcggtaatgccattgcgttaattaccgcaggtcttatgtctctggcctttatgggctttagtggtttggtgaagttgtaatgaatgctatctggattgccgttgccgccgtgagcctgctgggcctggcgtttggcgccattctgggttatgcctcccgccgttttgcggtggaagacgatccggtcgttgagaaaattgacgaaatcttaccgcagagccagtgtggtcagtgcggttatcccggctgtcgcccctacgcggaagccatcagctgtaacggtgaaaaaatcaaccgttgcgccccaggtggcgaagctgtgatgctaaaaattgccgagttgcttaatgtcgagccgcagccgctggatggcgaagcgcaagagataacgcctgcgcggatggtggcggttattgatgaaaataactgtattggctgcactaaatgtattcaggcgtgtccggtagacgccatcgttggcgctacccgtgccatgcatacggtaatgagtgatctctgtacgggctgcaatttatgtgttgatccgtgcccgacgcactgcatcagcttgcaaccggtcgcagaaacacctgactcctggaaatgggatctgaacaccattcccgtgcgtatcattcccgtggaacaccatgcttaagttattctctgcattcagaaaaaataaaatctgggatttcaacggcggcatccatccaccggagatgaaaacccagtccaacggtacacccctgcgccaggtacccctggcgcagcgttttgttattccactgaaacagcatattggcgctgaaggtgagttgtgcgttagcgtcggcgataaagtattgcgcggccagccgcttacccgtggtcgcggcaaaatgctgcctgttcacgcgcccaccagcggtaccgttacggctattgcgccccactctacggctcatcctagtgctttagctgaattaagcgtgattattgatgccgatggtgaagactgctggatcccgcgcgacggctgggccgattatcgcactcgcagtcgcgaagagttaatcgagcgcatacatcagtttggtgttgccgggctgggcggtgcaggattcccgacaggcgttaaattgcagggtggcggagataagattgaaacgttgattatcaacgcggctgagtgcgagccgtacattaccgccgatgaccgtttgatgcaggattgcgcggctcaggtcgtagagggtattcgcattcttgcgcatattctgcagccacgcgaaattcttatcggcattgaagataacaaaccgcaggcgatttccatgctgcgcgcggtgctggcggactctaacgatatttctctgcgggtgattccaaccaaatatccttctggcggtgctaaacaattaacctacattctgaccgggaagcaggttccacatggcgggcgtagttccgatatcggcgtattaatgcaaaacgtcggcactgcttatgcagtgaaacgtgccgttattgatggcgagccgattaccgagcgtgttgtaaccctgactggcgaagcaatcgctcgcccgggcaacgtctgggcacggctggggacgccagtgcgtcatttattgaatgatgccggattctgcccctctgccgatcaaatggtgattatgggtggcccgctaatgggctttaccttgccatggctggatgtcccggtcgtaaagattaccaactgtctgttggctccctctgccaatgaacttggcgaaccacaggaagaacaaagctgcatccggtgtagcgcctgtgctgacgcctgccctgcggatcttttgccgcaacagttgtactggttcagcaaaggtcagcaacacgataaagctaccacgcataacattgctgattgcattgaatgtggggcttgcgcgtgggtttgcccgagcaatattcccctggtgcaatatttccgtcaggaaaaagctgaaattgcggctattcgtcaggaagaaaagcgcgccgcagaagccaaagcgcgtttcgaagcgcgccaggctcgtctggagcgcgaaaaagcggctcgccttgaacgacataagagcgcagccgttcaacctgcagccaaagataaagatgcgattgctgccgctctggcgcgggtgaaagagaaacaggcccaggctacacagcctattgtgattaaagcgggcgaacgcccggataacagtgcaattattgcagcacgggaagcccgtaaagcgcaagccagagcgaaacaggcagaactgcagcaaactaacgacgcagcaaccgttgctgatccacgtaaaactgccgttgaagcagctatcgcccgcgccaaagcgcgcaagctggaacagcaacaggctaatgcggaaccagaacaacaggtcgatccgcgcaaagccgccgtcgaagccgctattgcccgtgccaaagcgcgcaagctggaacagcaacaggctaatgcggaaccagaagaacaggtcgatccgcgcaaagccgccgtcgaagccgctattgcccgtgccaaagcacgcaagctggaacagcaacaggctaatgccgagccagaacaacaggtcgatccgcgcaaagccgccgtcgaagccgctattgcccgagccaaagcgcgcaaacgggaacagcaaccggctaatgcggagccagaagaacaggttgatccgcgcaaagctgccgtcgaagcggctattgcacgcgccaaagcacgcaagctggaacagcaacaggctaatgcggtaccagaagaacaggttgatccgcgcaaagcggcagttgccgcggctattgcccgcgctcaggccaaaaaagccgcccagcagaaggttgtaaacgaggactaaatggtattcagaatagctagctccccttatacccataaccagcgccagacaagccgcattatgctgttggtgttgctcgcagccgtgccaggaatcgcagcgcaactgtggttttttggttggggtactctcgttcagatcctgttggcaagcgttagtgctctgttagccgaagctctcgtactcaaactacgcaagcagagcgtagccgcagcgttgaaagataacagtgcattgctgacaggcttattgctggcggtaagtattccccccctcgcgccatggtggatggtcgtgctgggtacggtgtttgcggtgatcatcgctaaacagttgtatggcggtctgggacaaaacccgtttaatccggcaatgattggttatgtggtcttactgatctccttccccgtgcagatgaccagctggttaccgccacatgaaattgcggtcaacatccctggttttatcgacgccatccaggttatttttagcggtcataccgccagtggtggtgatatgaacacactacgcttaggtattgatggcattagtcaggcgacaccgctggatacatttaaaacctctgtccgtgccggtcatagcgttgaacagattatgcaatatccgatctacagcggtattctggcgggcgctggttggcaatgggtaaatctcgcctggctggctggcggcgtatggttgctatggcagaaagcgattcgctggcatattcccctcagcttcttagtaacgctggcgttatgcgcaatgttgggctggttgttcagtccagaaacactggcagcaccgcaaattcatctgctgtctggagcgaccatgctcggcgcattctttattttgactgacccggttaccgcttctacgaccaatcgtggtcgtcttattttcggcgcgcttgcgggcttattagtctggttgatccgcagtttcggcggctatcctgacggcgtggcttttgccgtcctgctggcgaacatcacggttcctctgatcgattactacacgcgtccgcgcgtctacggccatcgcaaagggtaaaccatgctgaaaactatccgaaaacacggcattacgttggcgctatttgcagcgggtagtacagggttaactgcggccatcaaccagatgaccaaaacgacgattgctgaacaggccagtctgcaacaaaaggcgttatttgatcaggtgctgccagccgaacgctataacaatgcgctggcacagagttgctatctggtaactgcgccagagttaggtaaaggtgagcatcgggtttacatcgccaaacaggatgacaaaccggcagccgccgttctggaagcaaccgcgccagatggctattccggtgcgattcagctgctggtgggagccgattttaacggcacggtacttggcacgcgcgtgacagagcaccacgaaacgccagggcttggcgataaaatcgaactgcgcctttctgactggatcacccattttgcgggtaaaaaaatcagtggtgcagatgatgcgcactgggcggtgaagaaagatggtggtgatttcgaccagttcaccggcgcgacgattactccccgcgcggtggttaatgcggtaaaacgcgccggattgtacgctcagacgttaccggcacaactttctcaacttcctgcctgtggagaataaagcgtgagcgaaattaaagacgttattgttcaggggttgtggaaaaacaactctgcgctggtccagttgctcggcctttgtcctctgttggcggtcacgtccactgccactaacgctctgggtttaggacttgcgactacgctggtactgacgctgaccaacctgaccattagcacgctgcgtcactggacgccagccgagatccgcattcccatttacgtgatgatcatcgccagcgtggtcagcgctgtacagatgctgatcaacgcctacgcctttggcctgtatcaaagtttagggatttttattccgctgattgtcactaactgtatcgttgtgggccgcgctgaagccttcgccgccaaaaaaggtccggcgcttagcgcactggacggctttagtattggtatgggcgcaacctgcgccatgttcgtgctgggtagtctacgcgaaattatcggcaatggcacattgtttgacggtgcagatgcgctgttaggtagctgggcaaaagtattacgcgtggagattttccacaccgactcccctttcctgctggcgatgctgccaccaggtgcatttattggcctgggactgatgctggcaggaaaatacctgattgatgaaagaatgaaaaagcgccgtgctgaagcagctgcagaacgtgcattgccaaacggtgaaacagggaatgtctgatgaataaagcaaaacgcctggagatcctcactcgcctgcgtgagaacaatcctcatcccaccaccgagcttaatttcagtagcccttttgaattgctgattgccgtactgctttccgctcaggcgaccgatgtcagtgttaataaggcgacggcgaaactctacccggtggcgaatacgcctgcagcgatgcttgaactgggcgttgaaggggtgaaaacctatatcaaaacgattgggctttataacagcaaagcagaaaatatcatcaaaacctgccgtatcttgctggagcagcataatggcgaggttccggaagatcgtgctgcgcttgaagccctgcccggcgtaggtcgtaaaacagccaacgtcgtattaaacactgcattcggctggccgactattgctgtcgacacgcacattttccgcgtttgtaatcgtactcaatttgcgccggggaaaaacgtcgaacaggtagaagaaaagctactgaaagtggttccagcagagtttaaagtcgactgccaccattggttgatcctgcacgggcgttatacctgcattgcccgcaagccccgctgtggctcttgtattattgaagatctttgtgaatacaaagagaaagttgacatctgaagaaaaggggtaacaccgattaccccattgataacctttctttatcctcttttaaaacatctttttaacgtcaatgatgccattgcttagcgttatcatcaggtaatccgtttgcggataaccaaaaatgcaggttaattgtttttttaatagcgaaattttctattcattcgtgatcaagatcacgatgctgtcgcaatgtaaaaacattgcaagaatcaggttaaatcatttaaatttacacacgcaacaaatattgacctacaaaacattacactggctatttttcagaaactggactatctcactagtaaaaacgctaaatagcagaacatatcgccgttaagccatcacccccctctcagtgcagtgaaaaaatctgccgttacgttttttgaaaaatttaacgctggataacatttcccggaatggttgaattccccgcctcagttatatgtaacagattattacaaaggacttgtctgaaagtgcaagatagtgaacattacctgccgtttcccctcccactataacaattgcgcgtatgttttttatacataacgcgagaaagcacccccgttaatatgggatgtaaaaaaagaggtaaaagtgtccactgcaaaccaaaaaccaactgaaagcgtcagtttgaacgctttcaaacaaccgaaggcgttctatctcatcttcagcattgagttatgggaacgttttggttattacggcctacaaggaattatggctgtttacctggttaaacaactgggtatgtctgaagcggatagtatcacccttttctcttcctttagtgccctggtttatggtctggtcgctatcggcggctggttaggtgacaaggtactgggtactaaacgcgtaattatgctcggcgctattgtgctggcgattggttatgctctggttgcctggtctggtcacgacgccggtatcgtttatatgggtatggcggctattgcggtcggtaacggcctgtttaaagctaacccgtcttctctgctttctacatgctatgagaaaaacgacccgcgtctggacggtgcattcaccatgtactacatgtccgtcaacatcggctctttcttctctatgattgctacgccgtggctggccgcgaaatacggctggagtgttgcgtttgcgttgagcgttgtaggcctgctgatcactatcgttaacttcgccttctgccaacgctgggttaaacagtacggtagtaaaccagacttcgagcctatcaactaccgtaacctgctgctgaccattattggtgttgtggcactgatcgctatcgccacctggctgctgcacaatcaggaagttgcgcgtatggcgctgggcgttgttgccttcggtatcgtggttatcttcggtaaagaagccttcgcgatgaaaggtgctgcgcgtcgtaaaatgatcgttgccttcatcctgatgctcgaagccattatcttcttcgtgctgtacagccagatgccaacgagtctgaacttctttgcgattcgtaacgttgagcactccattctgggtctggccgtagaacctgagcagtatcaggcactgaacccgttctggatcatcatcggtagtccgattctggccgctatctataacaagatgggcgataccctgccgatgccaaccaagtttgcaatcggcatggtgatgtgttctggtgcgttcctgattctgccgctgggtgcgaaattcgcgtctgacgctggtatcgtgtctgtaagctggctggtcgcaagctatggcctgcagagcatcggggaactgatgatctctggtctgggtctggcaatggttgctcaactcgttccgcagcgtctgatgggcttcattatgggtagctggttcctgaccactgccggtgcaaacctgattggtggttatgttgcgggtatgatggctgtgccggataacgttaccgatccgctgatgagtctggaagtctatggtcgcgtattcttgcagattggtgtcgctactgccgttattgcagtactgatgctgctgaccgcgccgaaactgcaccgcatgacgcaggatgacgctgcagacaaagcggcgaaagcagccgtagcgtaaaattcagggaaactcttttacaagccgctaacttttcgttagcggctttttttttgttcagcaacgcactaccatactttaaaccacagacaaaaggagttaccgatgaaattgttctacaaaccgggtgcctgctctctcgcttcccatatcaccctgcgtgagagcggaaaggattttaccctcgtcagtgtggatttaatgaaaaaacgtctcgaaaacggtgacgattactttgccgttaaccctaaggggcaggtgcctgcattgctgctggatgacggtactttgctgacggaaggcgtagcgattatgcagtatcttgccgacagcgtccccgaccgccagttgctggcaccggtaaacagtatttcccgctataaaaccatcgaatggctgaattacatcgccaccgagctgcataaaggtttcacacctctgtttcgccctgatacaccggaagagtacaaaccgacagttcgcgcgcagctggagaagaagctgcaatatgtgaacgaggcactgaaggatgagcactggatctgcgggcaaagatttacaattgctgatgcctatctgtttacggttctgcgctgggcatacgcggtgaaactgaatctggaagggttagagcacattgcagcatttatgcaacgtatggctgaacgtccggaagtacaagacgcgctgagtgcggaaggcttaaagtaatagccatcggcccacaggtcgttgtgggccgaaatgagatatttcagagctttgttgcgctgaagtaatgttctggtttggcaatacgatcctgagcagccaccacttgcagctcatattcctgcattgctttggtggtcaccatgatttcgtagactgcagcggtcacatgttccagcgcctcctgcagcgttgccccctgaagcagtttcaccagcagtaaaccgctcgtcacatcaccaacacctaccggctggcgcataccaaaatccaccagcggacggctgatatgccaggcttcatcggcggtgaccagcagcatttcaaaacggtcacggctgtagccagctcgcgccaggtgtttaaccaacacaatttgtggcccttgcgcaatgagttcgcgcgctgccagaaccgcttcttcgacgttatttaccgcatgctcacagagtatttccagctcaaccagatttggcgcaatgatatcgctggcaggcaaaccgtgccgcacatgaaactctgcgacacccggtgcaacgatacagcctttttccggatgacccattaccggatcgcaaaaatatttcgcctgcggattcgcggctttcacctgacggacgataccgaggatatgttcaccctgctccgcgcttcccagatagccacttaatacggcatcacaggtgtgtaatttatcaatggcggcaatgccttgcacaatttcggttaaatggctgggcggcatcacgcagccagtccatttgccgtattgggtgtgattagaaaattgaacggtgttcagcggccagacgttcgcgcccaggcggcgcatcggaaactctgccgcactgttacccgcatgaccataaacaacgtgagactggatagcgagaatatttttcatcatgttccctgtataaaaaccagggggagtgatttctcactccccctttccacttaatgcattatttccagcaaatcagacagtaattctttttaccgcgacgcagtaaggtaaaacgaccaaacagacgatcttcttctttaaagaagtattcaggatcggactgtttttcaccgttaatggtgatggcattggaggcgatagttttacgtgcctgaccacgggaaggttgcagttcagaatcgaccagtgcctgcatcaggtctgcgcccttttccatctcaaccatcggtacgccgtcctgcgccagctgttcgaagtccgcttcactcagcgcactcaaagaaccgctgaacaggcattcggtaatacgttttgccgcctgtaaaccttcttcaccgtgaaccagacgagtcacctgctccgccagtacatactgggcgcgcggtgctttaccgctgtttttatcttcttcttccagggcgttgatctcttcaatgctcataaaggtgaagaacttcaggaagcggtaaacgtcggcatccgcagtgttgatccagaactggtagaatttgtacgggctggttttcttcggatccaaccagactgcgccgccttcagttttaccaaatttggtgccatctgctttagtgatcagcggaacggtcaggccaaacacctgattctgatgcagacgacgggtcaggtcgataccagaagtgatgttaccccactggtcagaaccaccaatttgcagcaccacaccgtactgtttgttcagacaggcgaagtcataaccctgcaacaggttgtaggaaaactcagtgaagctaatcccctgatcttcacggttgagacgctgcttaaccgcttctttgttgatcatctggttaacggagaagtgtttgccaatatcgcgcaggaaggtcagcacattcatattgccgaaccagtcatagttgttcgccgcgatagcagagttttctccacagtcgaaatcgaggaacggggcaacctgcttacggattttgtccacccactcctgaacagtttcttcggtgttcagcttacgctcggcagctttgaagctcgggtcgccaatcagacccgtcgcgccgcctaccagcgcaaccggcttgtggcccgcctgctggaagcgtttcaggcataacaatggaacaagatgccccaaatgcaagctgtcagcggtaggatcgaagccgcaatagagcgcgatcgggccttgcgccagtcgctctgctaacgcttcctcgtccgtcacctgggctaccagcccccgctcttgcaattgtttaatcaagttactgcttgccatcaaaatctccatgtatataacgactgcacctttgccggtacacgacttttcgccagatgcgaaagagacatagaataaagtgccagaatcaggagtaccagcgattaaagcaagatttttgcatcttttcagggtgcaagacgatcaatcttccacgcatcattttcacgctggtacaaaaagcggtcatgcaggcgatgctcaccaccctgccagaactcaatctgttcaaggctgacgcgaaaaccgccccaaaagctcggcaatggcacttcgccctgttgaaacttctgcttcagctccaggaatttactttcaaggataccgcgggcagaaatgcgactggactgcttgctaacccatgcaccaatctggctatcacgcgggcggctatgaaaatatttcatcacttcgagagtgctaagtcgttctgctttaccgatcaccatcacctggcgctcaagggtatgccacgggaacagcaggctaacgcgcggattattttcgatttgatgtgctttacggctgccgaggttggtgtaaaacaccatgcctttttcgtcgtaatgtttgagtaaaacgatgcgctgataaggctgaccatgttcatccacggtagcgaccaccatcgcggtagggtccgccagtttggcttcacaagcctgagagagccaacgttcaaaaagggttaatggatcggcgggaagatcgcggcggcgtaacccgcctttggtgtattcacggcgcagatgcgcgatttgctgcaattcgtcgttatcagacatggttttctttacggattgtcagtgggtgacgctattgtgcgccgcccctggaaaaatctcaacgctgtggattttgtaactgacagttattcaagacgatgcggtcgcgtttatagacagtcgcttcatcgcctttgctccagaaaacatagattccgtcagtgtaacgcgcgccagaggcactaatgccctgtttgagatgcagtagttgattatcgtaaacaaaactgacctcctggcgcggattattcagtttgaccgtcaacggtttttcatcacactggtattccagcgtatcggtttgcatgcgctcaaccagctgattaaaggcgctacagccggagagaaggaccggcaaaatgataattaacagttttttcatagtcatatcccgaagactttcctggtctggagggcaatacgccctccctaacgttccaagtgtaacggcagacgcggtaagaaaaattcagttaactctgatatcacgggttagcggggaaaatagcccccagtaccgtctcctggcttgcgccagtgacggaaggcagatttcctggtaatcccgccagcgtccgccaggcaagccaggcgaaagccaatgcttccatgtcatcgccactaatgccaacggcatcggtggtggtgacttctgtgcctggcagtaatgccgccagacgcgccatgagtagcggattacgactacctccaccacataccatcaatcgttcgcagccaccgctcaacaaaacttgttcagaaatggtcacggcggtgagttctgccagtgtcgcctgcacatctcggggatcaacacccggaaaatggcgcaaatggcgctccagccaaccatagttaaagtattcgcgtccggtgcttttcggtgcaggttggctgaaatacgggtcgctgagcatattttgcagcagtgggagaataactttacccgcccgtgcccactcggcatctttatcgtaaggtttaccggcctgacgccagatccaggcatccatcagcatgttaccaggaccggtatcgtagcccccaaccggctgcccaggaatgagcagactcagattggcgatgccgccaatattgagcaccattcgtcgctcggttgggtgagccagcagcgcatgatggaacgcaggtaccagcggtgcgccttgtcctcccaaggcaatatcgcgacggcgaaaatcaccgacaaccgtaattccggtgcgtgccacaatttgattgttatcgccaatctgtaaagtgtgtggtgccacgcccgtcggttcatgccagacggtttgaccgtgacaaccgatcgcaactatatctcttgcctgcagattttgttccttaagcaaggcattgaccgcatcagcaaaaagttgcccgagttgagtatcaagctgtccaaactggctaagtgtaagctgctggccctggcaaatatccagtacagcctgtttcagagataccgggatcggccaactcaaacttgccagctgtgcgacccggtgttcatcaattgtcgccaacacaacatcaacaccatcaaggctggtgccactcataacgccaataaagcggccgcttttcatagttcatcctttttcaatctgacgtttgcgcaccactcaaacataaacttttcgtgaataccatgcggaatgaccgatttttaccgttggtagtaaaacattatcttcaaatcaataatcatcatgaatgttttgtttataattggttgatcctactttcattatgatttgctcatatttggtagaacatgtaaccatggattcacatatgccatatactttgaccatgagggatgcttgcgtggcgtttcatggtgaacaggagatttttcaatgattaaacgcgtattggttgttagtatggtaggtctgtctcttgtcggttgtgttaataacgacaccctgagtggggatgtttataccgcttctgaagcgaaacaagtacagaatgtcagctatggcaccatcgttaacgtacgtccggtacagattcagggcggtgatgattccaacgttatcggtgcaattggcggtgctgttcttggtggtttcctggggaatactgttggtggcggaaccgggcgttctctggctactgcagcaggcgctgttgcaggtggcgtagctggtcagggcgtacagagtgcaatgaacaaaacgcagggtgtcgagctggaaattcgtaaagacgatggtaataccatcatggtggtacagaaacaaggcaacactcgtttctctccgggccaacgtgtcgtactggccagcaatggcagtcaggtgaccgtttctccgcgctaaataagtttgcgtgtggtcaggttactgaccacacgcccccttcatttcaccctttggcctgtaactcaatgatattatgctcaagttttgcgatgagcgtaatcagttgctccagttcctctgcggagatgccatgtaatatttccgcgcgggttttgttaataacagcttccatttcgctgatcagcggctctgccttttccgtcagtttaatacgtttagcccgacgatcgctggcacaagtttgacggctaattaaccctttttcttccagttggtccagagtacggaccagacttggctgctcgatgccaatcgcttttgccagttgaatttggctctggtctggaggtaactgatggatattgtgtaacgtaacccaatgggtttgtgttaactccagcggtttcaggcgatggtctatcagagcacgccatatgcgcaccaaccgtgccagatcagaacctagtgggctttccaatttcatctccttataattagcttgctaagatattatgcggcttttagaatagtgtgcagcaattgtattgctaaaacaaatgtattgctgcatttggttaccgtcagacatatttttcagaaattgcgcgtaaatttttcgcacttaaagaatatttattaatctaacgcaatatattcggtcgtaaaggaatctactttgtgaagtttatgctcaatgcaacaggattgcccttacaagatctggtgttcggtgcgtccgtctactttcctccgtttttcaaagcattcgcgtttggattcgtcatctggcttgtcgtacaccgcctgcttcgtggctggatctacgccggtgacatctggcatcccttgttaatggatttaagcctgtttgcgatttgcgtttgccttgctctggcaatactgattgcgtggtaactatgagtattaaaacaattaagtatttcagtacaatcattgtagcggtagttgcggttcttgccggatggtggctgtggaattattacatgcaatctccgtggacacgcgacgggaaaatacgcgcagaacaggtttctatcaccccacaggtgagcggacgtattgttgagctgaatataaaagacaaccagctggttaacgcgggggatcttctgctcacgatcgataaaacgccctttcagatcgccgagctgaacgcacaggctcagctggcgaaagcgcaatctgacctcgcaaaagccaataacgaagcgaatcgtcgtcgtcatctcagtcaaaattttatttctgccgaagaactcgataccgctaacctcaatgttaaagcgatgcaggccagtgttgatgccgcacaggcgacgctgaaacaggcacaatggcaactggcgcaaacggaaattcgcgccccggtgagtggatgggtgactaaccttactacccgcatcggcgattacgctgataccgggaaaccgctgtttgcccttgtcgacagccacagcttttacgtcattggttattttgaagaaaccaagttgcgccatatccgcgaaggtgcaccagcacaaattaccctctatagtgataacaaaacgttacagggtcacgtttccagtatcggtcgggcgatttatgatcagagcgttgaaagtgacagtagccttattccggatgttaaacctaacgtcccctgggttcgactcgcccaacgcgttcccgtccgctttgcgctggataaagtcccaggcgatgtcacgttggtgagcggcaccacctgtagcattgccgtaggtcaataatgaacgcaagcagttggtccttgcgcaatttgccctggttcagggccacgctggcgcaatggcgttatgcgttacgcaataccattgccatgtgtctggcgctgacggttgcctattatttaaatctggatgaaccctattgggcgatgaccagcgctgcagtggttagctttcccaccgttggcggtgttatcagcaaaagcctcggacgcatcgctggcagtttgctcggagccattgcggcactgcttcttgccgggcatacgctcaatgagccgtggttttttctattgagcatgagcgcgtggcttggcttttgtacctgggcctgtgcgcacttcacgaataacgtcgcgtatgcatttcaactggcgggctacacggctgccatcatcgcctttccgatggttaatattactgaggccagccagctgtgggatatcgctcaggcgcgcgtttgcgaggtaatagtcggtattttgtgcggcggcatgatgatgatgatcctgccgagcagttccgatgctactgcccttttaaccgcattgaaaaacatgcacgcccgattactggaacatgccagtttactctggcagcctgaaacaaccgatgccattcgtgcagcacatgaaggggtgattgggcagatactgaccatgaatttgctgcgtatccaggctttctggagccactatcgttttcgccagcaaaacgcgcgccttaatgcgctgctccaccagcaattacgtatgaccagtgtcatctccagcctgcgacgtatgttgctcaactggcccagtccgccaggtgccacacgagaaattctcgaacagttgctgacggcgctcgccagtagccaaacagatgtttacaccgtcgcacgtattatcgccccgctacgcccgaccaacgtcgccgactatcggcacgtcgccttctggcagcgactacgttatttttgccgcctttatctgcaaagtagtcaggaattacatcgtctgcaaagcggtgtagatgatcataccagactcccacggacatccggcctggctcgtcataccgataacgccgaagctatgtggagcgggctgcgtacattttgtacgttgatgatgattggcgcatggagtattgctagccaatgggatgccggtgccaatgcattaacgctggcagcaattagctgcgtactctactccgccgtcgcagcaccgtttaagagcttgagtcttctgatgcgcacgctggtgttacttagcctattcagctttgtggtcaaatttggtctgatggtccagattagcgatctgtggcaatttttactgtttctctttccactgctggcgacaatgcagcttcttaaattgcagatgccaaaatttgccgcattgtgggggcaactgattgtttttatgggttcttttatcgctgtcactaatcccccggtgtatgattttgctgattttcttaacgataatctggcaaaaatcgttggcgtcgcgttggcgtggttagcgttcgccattctgcgtccaggaagcgatgctcgtaaaagccgccgccatattcgcgcgctgcgccgggattttgtcgatcagctaagccgccatccaacactgagtgaaagcgaatttgaaagcctcacttatcatcacgtcagtcagttgagtaacagccaggatgcgctggctcgccgttggttattacgctggggtgtagtgctgctgaactgttctcatgttgtctggcaattgcgcgactgggaaagccgttccgatccgttaagccgagtacgggataactgtattagtctgttgcggggagtgatgagtgagcgtggcgttcagcaaaaaagtctggcggccacacttgaagaattacagcggatttgcgacagccttgcccgtcatcatcaacctgccgcccgtgagctggcggcaattgtctggcggctgtactgcagccttagccaacttgagcaagcaccaccgcaaggtacgctggcctcttaattacttaattacaccacaggcatagcgttcaccgccaccgcccagcggtttaggttgatcggacatattatcgccgccaacgtggaccatcagcgctttgtctttgatttcatccagacttttcagacgaggcgcgatgacggcatcggtagctttgccgtcattattgacgaccagtgcaggcagatcgcctaaatgcccggcaccttctggcccttcatgtttaccggtattttgtggatcaagatgcccgcctgcggattccgcggcgctggctttgccatctttggtggctggctggcagcttcctttggcatgaatatggaagccatgttcaccggggggtaatgctttcagatcggggctaaactccagacctttatcggtttcagtaatggtgacgctaccaatactctgccctaccccttggctcgtgacgaggttcatctcgactttttcactggcagcttgtgcgccggttgcaacaaccagcgccagaatagccagactaaaacgtttcataggacctccgttcattgtgcattcctgaataagtgtaaaccagtgacacatttttgaacggcggctattcctaaaagtgcttacggtacgtcgtaccccagtgccgctttacggatacgaaaccattgttgacgggtcattttcagtgtttctgcttcgacagctgcccgtacgcgctcaattttaccactaccgataattggcagcggctggcttggtaaacgtaatacccaggcgtaaaccacctgttcaatgctgcccgcgtttaactcctctgccaccacagccagttcatcacgcagcggctggaaataatcatcattaaacagacgaccaccaccaaggcaggaccacgccatcggacgaacacgcagttgttgtagttggtcgagcgtgccatccagcagtaacggctgatgcaccggggatatttccacctgattagtggcaagggtaaacggcagacgactttgcaacagggcaaattgcgcaggcgtaaagttgcttacgccaaaatgacgcactttgccgctctgatgcagatgtttgaacgcgtccgccacttcatcggcatccattaacgggtctggtcggtggattaacagcaaatccagatgatcggtcgcgagattaattaggctctgttcggcgctcttaatgatgtgatcgcggtcagtgatgtaatgaccaatgacgttttcttcacgcgcggtcgtcgcgataccgcatttactgacgatttccatccgttcacgcaggtgaggtgccagtttcagtgcctcgccaaacgccgcttcgcactgatagccaccataaatatcagcatggtccacggtggtcacgccgagatccagatgctcttcaataaaactgaccagctggcgggcggacatattccagtccatcaatcgccagtagcccatcacaaaacgggaaaactccgggccttgcggcgcaatagtaatacgctgaaccataatcgcttcctcttatcagatatgagaggagtatacgcaagattaggttcaaaagagacttggttgctccggttcgtcactactcgctggcttatttgcgcgtaatttgcgcattaatcgctgccgacaaaggcgcagcacctcttgtttttcgccatcgctcattttattccagttaaaacgctcatcacgactacgaaaacagccgcgacaaaacccgcgttcgtcagactggcaaattccccggcacgggctctggacgggaaagaactctaattgctccgccacttcgccctcctcagataagattattaccattattgaagctgttaatgtccaaagtagcaactttgcttgcactagaccgactggtctactacactccaacgcatgaacaaacacaccgaacatgatactcgcgaacatctcctggcgacgggcgagcaactttgcctgcaacgtggattcaccgggatggggctaagcgaattactaaaaaccgctgaagtgccgaaagggtccttctatcactactttcgctctaaagaagcgtttggcgttgccatgcttgagcgtcattacgccgcatatcaccagcgactgactgagttgctgcaatccggcgaaggtaactaccgcgaccgcatactggcttattaccagcaaacactgaaccagttttgccaacatggaaccatcagtggttgcctgacagtaaaactctctgccgaagtgtgcgatctgagtgaagatatgcgcagcgcgatggataaaggtgctcgcggcgtgatcgccctgctctctcaggcgctggaaaatggccgtgagaaccattgtttaaccttttgtggcgaaccgctgcaacaggcacaagtgctttacgcactgtggcttggcgcgaatctgcaggccaaaattagccgcagtttcgagccactggaaaacgcgctggcccatgtaaaaaacattattgcgacgcctgccgtttaacaggcattttttatcaccagacgaccgggagcctttatgagttctgaaaaactgtattccccactgaaagtgggcgcgatcacggcggcaaaccgtatttttatggcaccgctgacgcgtctgcgcagtattgaaccgggtgacattcctaccccgttgatggcggaatactatcgccaacgtgccagtgccggtttgattattagtgaagccacgcaaatttctgcccaggcaaaaggatatgcaggtgcgcctggcatccatagtccggagcaaattgccgcatggaaaaaaatcaccgctggcgttcatgctgaaaatggtcatatggccgtgcagctgtggcacaccggacgcatttctcacgccagcctgcaacctggcggtcaggcaccggtagcgcctagtgcacttagcgcgggaacacgtacttctctgcgcgatgaaaatggtcaggcgatccgtgttgaaacatccatgccgcgtgcgcttgaactggaagagattccaggtatcgtcaatgatttccgtcaggccattgctaacgcgcgtgaagccggttttgatctggtagagctccactctgctcacggttatttgctgcatcagttcctttctccttctagtaaccatcgtaccgatcagtacggcggcagcgtggaaaatcgcgcacgtttggtactggaagtggtcgatgccgggattgaagaatggggtgccgatcgcattggcattcgcgttagtccaatcggtactttccagaacacagataacggcccgaatgaagaagccgatgcactgtatctgattgaacaactgggtaaacgcggcattgcttatctgcatatgagtgaaccagattgggcggggggtgaaccgtatactgatgcgttccgcgaaaaagtacgcgcccgtttccacggtccgattatcggcgcaggtgcatacacagtagaaaaagctgaaacgctgatcggcaaagggttaattgatgcggtggcatttggtcgtgactggattgcgaacccggatctggtcgcccgcttgcagcgcaaagctgagcttaacccacagcgtgccgaaagtttctacggtggcggcgcggaaggctataccgattacccgacgttgtaatccaacattgcgagcggcgtaaagccgccgctatactaaaacaacattttgaatctgttagccattttgaggataaaaagatgcgtcttcttcataccatgctgcgcgttggcgatttgcaacgctccatcgatttttataccaaagtgctgggcatgaaactgctgcgtaccagcgaaaacccggaatacaaatacagtctggcgtttgttggctacggcccggaaaccgaagaagcggtgattgaactgacctacaactggggcgtggataaatacgaactcggcactgcttatggtcacatcgcgcttagcgtagataacgccgctgaagcgtgcgaaaaaatccgtcaaaacgggggtaacgtgacccgtgaagcgggtccggtaaaaggcggtactacggttatcgcgtttgtggaagatccggacggttacaaaattgagttaatcgaagagaaagacgccggtcgcggtctgggcaactaatctcctgccgggcgtgaactcatcgcgcccgcatctttactgcatcgacaagtaatatttgtcataatgcgcgctgcaatttatccgtattaagagaatcagatgtccgataacgctcaacttaccggtctgtgcgaccgttttcgtggtttttatcctgttgtgatcgatgttgaaacagccggatttaacgccaaaaccgatgcgctgcttgagattgccgccatcaccctgaaaatggatgaacaaggctggctgatgccggacaccacattacatttccacgtcgaaccatttgtcggcgcaaatttgcaaccagaagccctcgccttcaacggcattgacccgaacgatcccgatcgcggcgcggtcagcgaatacgaggcgctgcacgaaatttttaaagttgtacgtaaaggtattaaagcgagcggctgtaaccgcgccattatggtggcgcacaatgccaattttgatcacagctttatgatggccgccgcagaacgcgccagtctgaaacgtaacccgttccaccctttcgccacttttgacactgctgcactggccgggctggcactcggacaaaccgtattgagtaaggcttgccagaccgctggcatggacttcgacagcacccaggcgcactccgcgctgtacgacaccgaacgcactgctgtgctgttttgtgaaatcgtcaaccgctggaaacgtctgggaggctggccgctatctgccgccgaagaggtgtaatcgagtcgatgcctgatgacatgcaatgattcaggcatctatagtgaggctattccacgcatcctgcatgatattcacggggaatagcgttaatggcagataatccagaccctagtagcctcctgccggacgtgtttagtccggcgacccgcgactggtttcttcgcgcctttaaacagccgaccgctgtccagccgcaaacctggcatgtggcggcgcgaagcgaacatgcgctggtgattgcaccgaccggctccgggaaaacgctggcagcatttctctacgccctcgatcggctcttccgcgaaggcggcgaagatacccgcgaggcgcataagcgtaaaaccagtcgcatcctctatattagtccgataaaagccctgggcaccgacgttcagcgcaacttgcagatcccgttgaagggtattgccgatgaacggcggcggcgcggcgaaacggaagtcaatcttcgcgtagggatccgtactggcgatacgcctgcacaggaacgcagcaaactcacccgtaatccgccggatattctgatcaccacacccgaaagtctctatctgatgctgacctcccgcgcgcgcgaaacgctacgcggcgtcgaaacggtaattattgatgaagtccacgcggtagcgggcagtaaacgtggtgcgcatctggcgttaagtctggagcggctcgatgcgctgctccacaccagtgcacagcgaattggcctttctgccactgtgcgcagtgccagcgatgtggcagcatttcttggtggcgatcgcccggttacggtagtcaacccgcccgcaatgcgccatccgcagatacgaattgtcgtaccggtcgccaatatggatgatgtcagtagcgtcgccagcggcaccggcgaagacagccatgccggccgggaaggctccatctggccatatattgaaacgggtatccttgatgaagtgttgcgccatcgcagcaccattgtctttactaatagccgggggctggcggaaaaactgacggcacgattaaatgagctttacgccgcacgcttacagcgttccccgtctatcgccgttgatgcggcccatttcgagagcacctccggcgcaacctctaaccgtgtacaaagtagcgacgtttttattgcccgcagtcaccacggctccgtctctaaagaacaacgagcaatcaccgaacaggcgctgaaaagcggtgaattacgctgcgtggtcgcaacctccagtcttgaactggggattgatatgggcgcggtggatctggtgattcaggtggcaacgccgctttctgttgccagtgggttacaacgcattggtcgcgccggacatcaggttggcggtgtatctaaagggctgtttttcccccgtacccggcgtgatttagtcgattccgcagtcattgtagagtgtatgttcgcaggcaggctggaaaacctgacaccaccgcataatcctctcgacgtccttgcgcagcaaaccgttgccgccgcggcgatggatgcattacaggtagacgaatggtactcccgcgtacgccgtgccgcaccgtggaaagatctgccaagacgtgtttttgacgccacgctggatatgctttccgggcgctatccctctggcgatttttctgcttttcgccccaaactggtctggaacagggagaccgggatattgaccgcccgacctggcgctcaattgttggcggttaccagcggcggcaccattccggatcgtggcatgtatagcgtgttattacccgaaggtgaagaaaaggccggtagccggcgggtgggtgaactggatgaggagatggtatatgagagccgggtgaacgacattatcactctcggcgctaccagttggcggatccagcaaatcacccgcgatcaggtgattgtgactcctgctccgggtcgttctgcccggctccccttctggcgtggtgaaggtaacggacgtccggctgaattaggcgagatgatcggcgattttcttcatttgctggcggatggcgcgttcttttccgggactattcccccgtggctggcagaagaaaatacgatcgccaatattcaggggttgattgaggagcagcgcaacgcgacgggcatcgttccggggagtcgccatctggtcctcgaacggtgccgtgatgaaattggtgactggcgtattattttgcactctccctatggaagacgggtgcatgaaccctgggcggtggcgattgccgggcgaatacatgcgctatggggcgctgacgcgagcgtggtcgccagtgatgacggcattgttgcacgtattcctgacaccgatggtaaattgcccgatgccgcgatttttttgtttgaaccagaaaagttgctgcaaattgtccgcgaggcggtaggcagcagcgcacttttcgccgcccgttttcgcgaatgcgccgcgcgggcattattaatgccggggcgcactccgggccatcgcaccccgctttggcaacaacggctgcgcgccagtcagttgctggaaatcgctcagggatatccggattttccggtcattctcgaaaccctacgcgaatgtctgcaagatgtttatgatcttcccgcactggaacgtttgatgcgtcgcctgaacggtggcgaaattcaaatatccgatgtaacgaccactacgcccagccctttcgccacaagtttattgttcggctatgtcgcggaatttatgtaccagagcgacgccccgctggcagagcgccgggcatccgtactgagcctggacagcgagttactgcgcaatctactcggacaggtcgatccgggggaattactcgacccgcaggtcattcgccaggtggaagaagagttgcaacgactggctcctggcagaagagcgaaaggtgaagaaggattgttcgacctgctgcgcgaactggggccaatgaccgttgaagacctggcgcaacggcatacaggcagcagtgaagaggttgcgagctatctggaaaatcttcttgcagtaaaacgaatcttcccagcgatgattagcggacaggagcgtcttgcctgtatggatgatgccgccaggctgcgtgatgccctcggcgtacgactaccagagagtttgccagagatttatttacatagagtcagttacccgcttcgcgacctctttctgcgctatctccgggctcatgctctggtcacggctgaacaactggctcatgagtttagtctcggtattgccattgtcgaagagcagcttcagcaactgcgtgaacagggtctggtgatgaatctgcaacaagacatctgggtgagcgatgaagtatttcgtcgtctgcgtttgcgcagcctgcaagccgccagagaagcgacgcgtcccgttgcagccacgacctatgcgcgattgctgctggaacgtcagggcgtattacccgccaccgatggtagcccggcgctctttgccagtacaagcccaggcgtttatgagggcgtagatggcgtgatgcgggtgatcgaacagcttgccggagtcggtttacccgccagtctctgggaaagccagatcctgcctgcccgcgtacgcgactatagcagtgaaatgctcgatgaattactggcaaccggtgcggttatctggagcgggcaaaaaaaactgggtgaagatgacggcctggtggcactgcatctacaggaatatgctgcagaaagcttcactcccgccgaagcggatcaggcgaatcgtagcgcgctgcaacaagcgatagtcgctgttctggctgacggaggagcctggtttgcacaacaaatcagccaacggatacgcgacaaaatcggcgaaagcgttgatctctctgccctgcaagaggcgttatgggcgctggtctggcaaggcgtcatcaccagcgacatttgggcaccgttacgcgccctcacccgcagcagttccaacgcacgcaccagtactcgccgcagtcaccgggctcgtcgtggacgtcctgtctatgcgcaacccgtcagcccgcgggtatcttacaacacaccaaatctggctggacgctggagcttattgcaggtggagccactaaacgataccgaaaggatgctggcgctggcggaaaatatgctcgaccgctacggcatcatcagtcgtcaggcggtgatagccgaaaatatccctggcgggtttccaagcatgcaaacgctttgtcgaagtatggaagactccgggcgaattatgcgaggtcgttttgtagaaggtctgggtggcgcgcaattcgctgaacgtctgactattgaccgattgcgcgatctggcgacacaagccacgcaaacgcgccactatacaccagtggcgctctctgccaacgatccggctaatgtgtggggaaatcttctgccctggcctgcacatccggcaacgctggttccaacgcgtcgggcgggtgcgctggtggtcgtttctggcggcaaattgttactctatctggcgcaaggtggcaaaaaaatgctggtctggcaggaaaaagaggaattactcgccccagaggttttccacgcgctgactaccgcactgcgtcgcgaaccacggctgcgctttacgctaacagaagtgaatgatctaccggtccggcaaacgccgatgtttacgctgctgcgtgaggcgggatttagtagtagcccacaagggctggattggggataaagaaaggactgacggatgcccgttcgcatccgtcagtattgcaggacggattattccgcgtccggctcttcagacttgtatttagcggcagtttctttgatcagctgctgcagttcgccacgctgatacatttcgatcacgatatcacaaccgccgaccagctcgccgtcaacccacagttgcgggaaggtcggccagttagcatatttcggcagttccgcacgaatgtccggattctgcagaatatcaacataggcaaaacgttcgccacatgcggcaagcgcctggactgcctgggcagagaaaccgcagctcggcagtttcggactacctttcatgtacagcaggatcgggttttcagcaatctggcgttggattttttcgatagtggtgctcattgtcttgcttcctcaaacttctttacggcagtaatctgacattgtagcgggtcagtgcggcatcggaaaataacattttcatcacgcttttgctattttatccctttgctctatttgttgcatttcaaatattcgtttcttctctgatgccggcaaactggcgtatttataaccatttttagctttcactgctgcatttttttgcgctcgccaacgaaacgtattttttaacaataaaagctattaactttctcttcttctatgcattagaatcatcaagttttgtaaatcagacgcaggcatgatagacctgcctttacagagggacgctcagtggcgcggataaaccgtattagcatcacgctctgtgctttactttttaccaccctgcctttaacgcctatggcccatgctagtaagcaagccagggagagttctgctaccactcatatcaccaaaaaagcagataaaaagaaaagcacggcaaccaccaaaaagacccagaaaacagcgaaaaaagccgccagtaaaagtacgaccaaaagcaaaaccgcttcttccgttaaaaaatcttccattaccgcttctaaaaacgccaaaactcgcagcaaacacgccgtcaataaaacggccagtgccagctttaccgaaaagtgtaccaaacgtaagggctataaaagccattgtgtgaaagtcaaaaatgccgcgagtggaactcttgccgacgcgcacaaagcgaaggtgcaaaaagctacgaaagtggcaatgaataaactgatgcagcaaattggtaagccatatcgttggggtggcagcagtccgcgtaccggttttgattgcagcggcctggtttattacgcttataaagatttggtgaaaattcgtattccgcgtacggcgaatgaaatgtatcacctgcgtgatgcagcgccaatcgaacgtagtgaactgaaaaacggcgacctggtctttttccgtactcagggacgcggcacagccgatcatgtcggcgtgtatgtcggcaacggcaaatttattcagagtccgcgcacaggtcaggaaattcaaatcacttctctcagtgaagactactggcagcgccactatgttggcgctcgtcgggtaatgaccccaaaaacacttcgctaaaactttaccctgttgttacggcaacagggtaagttcatcttttgtctcaccttttaatttgctaccctatccatacgcacaataaggctattgtacgtatgcaaattaataataaaggagagtagcaatgagtttcgaattacctgcactaccatatgctaaagatgctctggcaccgcacatttctgcggaaaccatcgagtatcactacggcaagcaccatcagacttatgtcactaacctgaacaacctgattaaaggtaccgcgtttgaaggtaaaagtctggaagagattattcgcagctctgaaggtggcgtattcaacaacgcagctcaggtctggaaccatactttctactggaactgcctggcaccgaacgccggtggcgaaccgactggaaaagtcgctgaagctatcgccgcatcttttggcagctttgccgatttcaaagcgcagtttactgatgcagcgatcaaaaactttggttctggctggacctggctggtgaaaaacagcgatggcaaactggctatcgttagtacctctaacgcgggtactccgctgaccaccgatgcgactccgctgctgaccgttgatgtctgggaacacgcttattacatcgactatcgcaatgcacgtcctggctatctggagcacttctgggcgctggtgaactgggaattcgtagcgaaaaatctcgctgcataataactgatggcaaatgcagcattgcctgaagcgctacgcttatcaggcctacgcggatcatcgatgtaggtcggataaggcactcgccgcatccggcaagataaatcgcacgttgtcagcaactgtaacgcagaaggttatccttctgcgtttttgtttaattagctgttagcaacgcaaactgtttcaggttgttttctggcactcataaacaccagcaataatgccagtcccgcgacaatcgctcccatcaccggcacaaagctgtatcccagcccagcggaaattaccgcaccaccagcagctgctcccagcgcatttccaagattaaaggcaccaatattgacactactagacagacctggcgcttcactggcgacacgcatcacgcgcatctgtaacggcggtacgaccgcaaaggttgctgcgccccacaccaccatgctaatagctgcgccgaactcattgcgggccaggaacgggattgccagcataatcaccatcaacaacaacaaaaagcctttcaacgtgccgttaacactacgatctgccagtttgccgccgagatagttaccgatagagaatccgacaccaatcagcaccagcattgccgtgacgaacaccggtgttgcgtgggtaatactttgcagtaccggagagatataggtgtagagagtaaacattgcaccagctcccagtaccgtcgtcagcaatgcagacagcacctgcggacgcattaataccgccagctcttttttcacttcaggtcgtgcccctgcaccacctttaggtaaactgaagaacagacttaccatactaatcactcccagccccgccgttgccagaaaactcatccgccagccgatggtttcacccaaccaggtcgccgccggcacgccaccgatatttgccagggttaaccccataaacatagtggcaactgcgctggcctgtttatgttttggcaccacgcttgcggccacgacactacccaaaccaaaaaatgctccgtgattcaggctggtcaaaatgcgactaagcatcagggtcatataatccggcgcgatggcggaaagtacgttgccgagcgtgaaaattgccatcaggaaaatcaacgcactgcggcgggcacgatgagaaagtagaagcgtcatcagcggcgcgccaaccattacgccaactgcataggcactgattaacattccggcagcgggaatgctgacatccacaccgcgcgcaatgacgggcaacaagcccattgggctgaactccgttgtcccgataccaaacgcgccaatcgccagcgccagcaacggatagttaattttcatgccttatctccacctcttcgcgtcattacgcgatattcattaaagtggcgaaagcatgacagcaatcacaaaaaaatgaaaataacaaaaagagaaaacacttttgccattttgctaacaaacaggaaggagatgcgagggagaacgcgctccctcgagaggaaatcagtgcagcgcggcagtcaaacccacggctacgatcaaaccgaggacgataatcgttgttaccagtgaaaatttaaggtcggtgctcatcaagttttctccttttttattaccacacaaaaagtgatattacgcatttttacacactgtgatgaaaaaatctcccgtcatttataatgataagtgtttttaccacttccccttttcgtcaagatcggccaaaattccacgcttacactatttgcgtactggccattgaccccttcctgacgctccgtgtcgtttttccggcgtaccgcaacacttttgttgtgcgtaaggtgtgtaaaggcaaacgtttaccttgcgattttgcaggagctgaagttagggtctggagtgaaatggaatggcaacaataaaagatgtagcgaaacgagcaaacgtttccactacaactgtgagtcacgtgatcaacaaaacacgtttcgtcgctgaagaaacgcgcaacgccgtgtgggcagcgattaaagaattacactactcccctagcgcggtggcgcgtagcctgaaggttaaccacaccaagtctatcggtttgctggcgaccagcagcgaagcggcctattttgccgagatcattgaagcagttgaaaaaaattgcttccagaaaggttacaccctgattctgggcaatgcgtggaacaatcttgagaaacagcgggcttatctgagcatgatggcgcaaaaacgcgtcgatggtctgctggtgatgtgttctgagtacccagagccgttgctggcgatgctggaagagtatcgccatatcccaatggtggtcatggactggggtgaagcaaaagctgacttcaccgatgcggtcattgataacgcgttcgaaggcggctacatggccgggcgttatctgattgaacgcggtcaccgcgaaatcggcgtcatccccggcccgctggaacgtaacaccggcgcaggccgccttgccggttttatgaaggcgatggaagaagcgatgatcaaggtgccggaaagctggattgtgcagggtgactttgaacctgaatccggttatcgcgccatgcagcaaatcctgagccagccgcatcgccctactgccgtcttctgtggtggcgatatcatggcaatgggcgcactttgtgctgctgatgaaatgggcctgcgcgtcccgcaggatgttagcctgatcggttatgataacgtgcgcaacgcgcgctattttacgccggcgctgaccacgatccatcagccaaaagatagcctgggtgaaacagcgttcaacatgctgttggatcgtatcgtcaacaaacgtgaagaaccgcagtctattgaagtgcatccgcgcttgattgaacgccgctccgtggctgacggcccgttccgcgactatcgtcgttaatcacccgttgcgggagtctcttccggctcccgcagccactccttattcagcgtctcactatcgccgagatactcaagcaaccaggttaacgcagggctcatatcattttgctgccatgtcagacaacatgcgctatccggaaaggggttttccagttctaatgctacccacttcccctcattaagccacggtttggcgaaatgtgttggcaccatccctatgcataatcctgcgctgatacaggttgcgctactttcccagtcaggcacgacaactcttttttggttatccagcaaccaggtaatacgtttaggtagcgttcggctggtgtcttcgcgcaccaagctcggccagttgcgcaacgtatcatcgctgaacgggccatccatcaacgccagcgggtggtgactggcaacaacgcaactccagcttagcatccccatatcccggaaggcataacgaccgcctaccggaatcgcgcgtgttgcgccaatcgccagttccacgcgcccgtcggaaagcgcatcccagacaccgttgaacacttcctgaaagacaagaagttcgacatcatcaaaatggcgataaaaatcaacgatcatctgccgtgtacgttctggcctgacaatattatccactgcgatagctaactgaccgcgccagccgttcgctatctgctgacattgctggcgggtgatctgcatttttttgacaacagagcgcccttctttgagaaaccacgctccagcagcggtcagctccacatcacggtgccgtcgttcaaagagcggcaccgccagccactcttccagctgacgcacggtatagctgaccgcagaaggaacgcgatgcagctcctgtgccgcagcgctaaaactaccattacgcgctaccgcatcaacaacttcgagactatattcactccacatagtctgcctgcaaaatttttgaaaccagtcatcaaatattaccgtttcacaacactaatttcactccctacactttgcggcggtgtttaattgagagatttagagaatatacatgcaacctgggaaaagatttttagtctggctggcgggtttgagcgtactcggttttctggcaaccgatatgtatctgcctgctttcgccgccatacaggccgacctgcaaacgcctgcgtctgctgtcagtgccagccttagtctgttccttgccggttttgccgcagcccagcttctgtgggggccgctctccgaccgttatggtcgtaaaccggtattattaatcggcctgacaatttttgcgttaggtagtctggggatgctgtgggtagaaaacgccgctacgctgctggtattgcgttttgtacaggctgtgggtgtctgcgccgcggcggttatctggcaagcattagtgacagattattatcctagtcagaaagttaaccgtatttttgcggccatcatgccgctggtgggtctatctccggcactggctcctctgttaggaagctggctgctggtccatttttcctggcaggcgattttcgccaccctgtttgccattaccgtggtgctgattctgcctattttctggctcaaacccacgacgaaggcccgtaacaatagtcaggatggtctgacctttaccgacctgctacgttctaaaacctatcgcggcaacgtgctgatatacgcagcctgtagtgccagtttttttgcatggctgaccggtagtccgttcatccttagtgaaatgggctacagcccggcagttattggtttaagttatgtcccgcaaactatcgcgtttctgattggtggttatggctgtcgcgccgcgctgcagaaatggcaaggcaagcagttattaccgtggttgctggtgctgtttgctgtcagcgtcattgcgacctgggctgcgggcttcattagccatgtgagcctggtcgaaatcctgatcccattctgtgtgatggcgattgccaatggcgcgatctaccctattgttgtcgcccaggcgctgcgtcccttcccacacgcaactggtcgcgccgcagcgttgcagaacactcttcaactgggtctgtgcttcctcgcaagtctggtagtttcctggctgatcagtatcagcacgccattgctcaccaccaccagcgtgatgttaagtacagtagtgctggtcgcgctgggttacatgatgcaacgttgtgaagaagttggctgccagaatcatggcaatgccgaagtcgctcatagcgaaagtcactgatctatatcgatatacttatacttaggctgctaacaaaattttgttgtatgattgaaattagcggcctatactaatttcgagttgttaaagctacgataaatattatgtttttacggggacaggatcgttcccgactcactatggatagtcatttcggcaagggttcctcctttccctctgttctacgtcggattatagactcgcggttttttctgcgagatttctcacaaagcccaaaaagcgtctacgctgttttaaggttctgatcaccgaccagtgatggagaaactatgagtagtagctgtatagaagaagtcagtgtaccggatgacaactggtaccgtatcgccaacgaattacttagccgtgccggtatagccattaacggttctgccccggcggatattcgtgtgaaaaaccccgatttttttaaacgcgttctgcaagaaggctctttggggttaggcgaaagttatatggatggctggtgggaatgtgaccgactggatatgttttttagcaaagtcttacgcgcaggtctcgagaaccaactcccccatcatttcaaagacacgctgcgtattgccggcgctcgtctcttcaatctgcagagtaaaaaacgtgcctggatagtcggcaaagagcattacgatttgggtaatgacttgttcagccgcatgcttgatcccttcatgcaatattcctgcgcttactggaaagatgccgataatctggaatctgcccagcaggcgaagctcaaaatgatttgtgaaaaattgcagttaaaaccagggatgcgcgtactggatattggctgcggctggggcggactggcacactacatggcatctaattatgacgtaagcgtggtgggcgtcaccatttctgccgaacagcaaaaaatggctcaggaacgctgtgaaggcctggatgtcaccattttgctgcaagattatcgtgacctgaacgaccagtttgatcgtattgtttctgtggggatgttcgagcacgtcggaccgaaaaattacgatacctattttgcggtggtggatcgtaatttgaaaccggaaggcatattcctgctccatactatcggtagcaaaaaaaccgatctgaatgttgatccctggattaataaatatatttttccgaacggttgcctgccctctgtacgccagattgctcagtccagcgaaccccactttgtgatggaagactggcataacttcggtgctgattacgatactacgttgatggcgtggtatgaacgattcctcgccgcatggccagaaattgcggataactatagtgaacgctttaaacgaatgtttacctattatctgaatgcctgtgcaggtgctttccgcgcccgtgatattcagctctggcaggtcgtgttcagtcgcggtgttgaaaacggccttcgagtggctcgctaaaggctattctatcgccccctctccgggggcgatttcagatcaggcttctgtgcctggttgattcatggcattttctcgtgccgccagcacacgttctaccgtatctaccactgcctgagtttgtggatcgatttcaatgttgacgcgtgcgccaagttttttcttcccaagagtcgtgcgttccagtgtttcccgaattaaatggacgcaaaaacgcgttggcgtgacttcgccgacggtcaggctaataccgtcgatgccaataaatcctttgtacagaatatatttcatcaactgactatcctggactttaaaccagatctggcgattattttcactggttaatattttcgccacttcagcagtggtcataatatgaccactcattaagtgtccgccaatttcatcactgaatttcgccgcacgctcaacgtttacccaatcccccacttttaaatcgccaagattggtaatgcgtaacgtttctttcatcaggtcaaaactgacatggttgccgttaatttccgtcacggtcaggcagcaaccgttatgcgccacggaagcaccggtttccaggccgtccagcatgtggtcgggtaactccaccacatgcgtacgaaaatttggtttctcgtcaatgctcaccagttttgcggtgccctgtacaatccccgtaaacatacttacaactcctgaaatcagttaagacattctgttcagcacaatagcaggtggaaaacgcccttaccagtgaaggggtaagaatggctattttttcactggagaattaataaatcctcgctacaatagactgaatttcccctgcttcttctttttgctgcccattcaggcggctttttagtctctcatataactacaaataaaaggtgttcacgtgcagaagtatatcagtgaagcgcgtctgttattagcattagcaatcccggtgattctcgcgcaaatcgcccaaactgcgatgggttttgtcgataccgtgatggcgggcggctatagtgccaccgacatggcggcggtcgctatcggtacttctatctggcttccggcgatcctctttggtcacggactgctgctggcattaacgccggttatcgcgcaattaaatggttccggtcgacgtgagcgcattgcgcatcaggtgcgacaaggtttctggctggcaggttttgtttccgttctcattatgctggtgctgtggaatgcaggttacattatccgctccatggaaaacatcgatccggctctggcggacaaagccgtgggttatctgcgtgcgttgttgtggggcgcgccgggatatctgttcttccaggttgcccgtaaccagtgtgaaggtctggcaaaaaccaagccgggtatggtaatgggctttatcggcctgctggtgaacatcccggtgaactatatctttatttatggtcatttcggtatgcctgagctcggtggcgttggttgtggcgtggctactgcggcggtgtattgggtcatgttccttgccatggtttcttacattaaacgcgcccgctccatgcgtgatattcgtaacgaaaaaggcaccgcaaaacccgatcctgcggttatgaaacgactgattcaactcggtttgccgattgcgctggcactgttctttgaagtgacactgtttgccgtcgtggctctgttagtgtctccgctcggtattgttgatgtcgcaggacaccagattgccctgaactttagtagtctaatgttcgtgcttccaatgagcctggcggcagcggtaactatccgcgtaggttatcgtctgggtcagggcagtacgctggatgcgcaaaccgctgcgcggaccgggcttatggtgggtgtctgtatggcaaccctgacggccattttcacggttagtctgcgggagcaaatcgccctgttgtacaacgacaatcccgaggttgtaacgctggctgcgcatttgatgttgctggcggcggtatatcagatttctgacagtatccaggtgattggcagtgggattttgcgtggttataaagatacgcgttccattttctatattacctttacggcttactgggtgctgggcttgccaagcggctatattctggcactgaccgatctggtcgttgaacctatggggccagcaggcttctggataggctttattattggcctgacgagcgcagccattatgatgatgttgcgtatgcggttcctgcaacgtctgccgagtgccatcattctgcaacgagcatcccgctaataaagacaaggcgcaaccttcacgggttgcgcctgtatttttacgcaggctggagcgttgcgccaatcccgtcttcgtctggctgtaatttcagagcgttacacagagtttgccgactggcatctgttatctcaacgtgtatatccccggtaacttcccctttcacattgatgaagtcaggactaatttcttttgcactggtttgcaggcaaatcgctccctctccgcgcaggcgtttcactttcagttgcacatgcgttgccgcatcagtgatcagccacagttttccaccattcagattgatgttaccaacaatgaaagtgacactgtcaccttttaccgtactgccgtctagaatcaacacaccgccctgctgtacagtaatcgtactttgttgcagctctgcgccataaccaataatcatactagcgccgtccagtaatgcaacactcccggtcagttcaaccggtgcgcgatcttcctctacgacaaaattttcgtccgcgctggtgggactcaacaggatcactgtcccaccttgtattaccgcgttttccagcgtaccggcatgcacttcagcccgaccacccacattcacggacaggttttgcgtcttaccggaactgtagagctgaaggccatccgtccccagacgataaatggatccattctcaacaatagtgtcagagtcttcaccaccgagattattcatggtgccaccagcaagcaacgtatcactggctttcccggccagcataaaaacgccgccctgattaatctcacaattgctggcttccccacctggatacaccaacaattcaccaccttcatctaccacgaccgcactggttgtcccattaaccaacaggccgccctcttgatcgagaatgattttttccgcgcgatgtccttccagtacacgcaggttaccgccattttccagcaacaaaccgcaggcataacctttatcaacgctgaattcaccttcgggatggcggccattaaccgtagcgagcgtagagagactaattgcgcctccctcggactgaacaatatctgtggcaatggcaccatcgctgacgcttagcgtgccattgttaccgtactgtgtgcatttggcgatcccaccggttgccactttcaaccagccagcccccgtgaccacggtattttcggctcttccgccagcttcaacaatcaactcgccttcagtaagttgcgtcgcgccaatgacctcgccggtcttaacaatttgcacgttcccgtcgctcatcaagtttttcgcatcagatcccatgatttattcctttgctgcatctgtgtgcctttattgctacctaagtgtaaaggctacggaggatttatccacgacagatttgagatggtggcaaacaactctgtttaaactctgatacacgaattattgggttgtatcagatgtaaatgcgatcctgaataaaaatcacccttgcaaatcaacaaaatatagccaatttgcttaaaagctctgcaaacggtcgaaatagcgcagaaaattacgttttgcctcttgccaccttcccactctgccgctaatattcgtccccgttgtcacctacaacgttgcgttcatagctcagttggttagagcaccaccttgacatggtgggggtcgttggttcgagtccaattgaacgcaccatcctgcgtccgtagctcagttggttagagcaccaccttgacatggtgggggtcggtggttcgagtccactcggacgcaccagattttcttaatctggtcttctcctttttccctctgtttcttctctgtatccaatacgttaaaagatttacactgtcttcgtatgcgttatcagaaggagaatcgctatggcaactttgttacaacttcattttgcttttaatggcccatttggcgacgcaatggctgagcagcttaaaccacttgctgagagcattaatcaggaacctggttttctgtggaaggtatggacagaaagtgaaaagaaccacgaagccggtgggatctaccttttcactgatgaaaaaagcgcccttgcctatctggaaaaacatactgcccgactgaaaaatctcggcgttgaggaagttgtcgccaaagttttcgatgtcaatgagccacttagtcaaatcaatcaggcaaaactcgcctgacagaatttaatcaagggcggttagcgcccttttcatccctgtctgaaatttctcaaattctaaaaatctcaaccaaacttatctgataacactaaattcgaaagaatgcgtacaggtaagtaacaatgaaaaaaattgctattgtgggtgccgggcctacggggatctacaccttattcagccttctacagcaacaaactccactttctatttctatcttcgagcaggctgacgaggccggtgtcgggatgccatacagtgatgaggaaaacagtaaaatgatgctggcaaatattgccagtattgaaataccgccgatttattgtacgtatctcgaatggctacaaaagcaagaagacagccatctccagcgttatggcgttaaaaaagaaaccttgcacgatcgtcagtttttaccgcgaattctgctgggcgaatatttccgcgatcaatttttacgactagtagaccaggcacgacagcaaaaatttgcagtggctgtttatgaaagttgccaggttaccgatctgcaaattacaaatgctggcgtcatgctcgctacaaatcaggatttacccagcgagacgtttgatttagcggtgatcgccacgggtcacgtctggcctgatgaagaagaagcaacccgaacgtattttcccagcccgtggagtggcctgatggaagcaaaggtcgatgcgtgtaacgtgggtattatgggaacatccttgagcggactggatgcggcaatggcagtggctattcagcatggtagcttcattgaagatgataaacaacacgtcgtttttcaccgcgataacgcaagtgaaaagctaaatatcacgttgttgagccgcacgggtattttacccgaagccgatttctattgccctattccctacgagcccttacacatcgtcaccgatcaggcattaaatgctgagattcaaaaaggcgaagagggccttttggatcgggtatttagattgatagtagaggaaatcaagtttgctgatccagactggagtcaacgcatagccttagagagcctgaatgtcgattcctttgctcaagcctggtttgccgagcgcaaacaacgcgacccatttgactgggcagaaaaaaatctccaggaagtcgaacgcaataaacgagaaaaacatactgttccctggcgttatgtcattctgcgcctgcatgaagccgtacaggaaattgttccacatctgaatgaacacgaccataaacggttcagtaaaggccttgcccgggttttcatcgataattatgcggcaatccctagtgagtctattcgtcgcctacttgccttacgtgaagcgggaatcattcatattctcgccctcggtgaagactacaaaatggaaattaatgagagccgcaccgtcctgaaaacggaagacaacagctacagctttgacgtttttattgatgcccgcggacaacgtccgcttaaagtgaaagatatccctttccctgggctacgcgagcaattacagaaaacaggggatgaaatccctgatgttggcgaagattatacgttacagcaacccgaagatattcgtgggcgcgtagcgttcggcgcgttgccctggttgatgcacgaccagcctttcgttcagggacttacggcatgtgcagaaattggtgaggcgatggctcgggcggtcgtaaagcctgcatcccgtgctcgtcggcgtcttagctttgattaaaggtaaagctatcagcactcaacaaactgatgctgttcattaagacgatagcggactccggctcgaatattgttttcaccttcaatggcgacggcgaagcgaactctttcgccgtcatgatatgccagtgcggcgcttcctcctggcccgagaataatactgtcgaccacgcccgtgctcactaccgtactattttcaccgctggcaatgatgtgtacattgtcgccgctgttggcaattctggcgtttgcgccaaagctggcgatttgcaccaggtcaccattactggcgacatgacaccgttcacccaatgtacaaacgcgtactcgcattccggtattcgcaatccgactgctatctccagcgctgcttatccggctagaattaccggttacagcaacccgtgcgcgttcaccggagctgccaatgtgactgttaaagccgacacttccaatccgcacgctataacccatactggcaatttgcgcggcatacccagcggttgcgattctggcgttatcctcacaacagccgatgcgagcatgatcgtcgctgcgggcaaactgactgcaaaatggtctctctccggggtctgtggccagtttttgcatagaggaaacttcctgatgcgcgaagttttcatccgccagccattttttccacgcatactcaaccagactctccgcccagtccgtatatccttcctcaatcagtgcatgatgaatatcggcataactaccgccgcgtgggaaatggcgcaggaaccagcgatacatcaccgctccgatacgccattctcgcaggtctgcttgtgtaatgatcattcgttagtgccggtgatagccatcgaccatgcttttaaaggtttcgtgtggcgtacgccccgtggtgcaaagataaagatgaccgaagataaaaaagaggcttataaatgccagagcaaaatgtgtctgcaataaccagtatcttacgccaggaaacacatctcccacggcttgcggatagagacacagcagccccgtcaatagtaacaacggcagcaatccatacatgacaccaacataggcgacctgctgtaagggattaaatttagactgggttgttgccgggaaaggatgttcttccccctgcataatgccaaacaaataaaatcgcgtttgttttgccgctcgttccagccacccctgacgacgaatgcgatagtggtgaccattatccccaacggcattgatcagcacaaagccgagccagcatgccagtaacaaaaatccgcaaacttcatgcaccgcaaccagacttttaaccgcagttgcgcccaccatcgcaaagtgatttatcagcccactggccagcaacaatacaaagagtaacgcattgctccagtgccataatctgaccgctttgctgtaaagataaatcttctcaccatgatcggtggcacttttcttcacgccacgagcacgaagcaaggcatgcagccccagcaccaaccacatcccaaccagcaatactccggcaatgatcaaccacaccggccaaaattcgggagtgaactgtggcacatagttcgctaactggctctgaaactgttcagcatgttggctcgggttcatacattttcctttttaatcaaatgttgaccgaaccggcgatacagatgcggtttcccggcaccaggtagctgatattgatagtatttattttgctgcaaccacgcctgaatttctgggctatcttcgcgaccaaagatcaatgcgtgttccgggcaggcgctgacgcaaatgggcggaaagccttttgccagtcgggactcagcgcagaaatcacatttatctgccactttagtgacagggttaaggtagcgaacctggtacggacaagcgccaatgcaataactgcagccgatgcactggcttttttctacccgcacgatcccctgctcatcacgccagctcgcccccgtcgggcaaacgtcgatgcacggagcatcttcgcagtgctgacaactctggcgaaaaaagtgatactgcgtttcgttgtcgttatcggtgactggaatgtgtgctatgcttaaacggcttccctgagcggggacgtggttagttttacggcatgcgcgggcgcaaatattacagccattgcaccgactctcgtcatgaatcatggcataccgaacttccttttcttgcctcgtgttcgctaacagagaagacgcagaaccagtaaaaaagattactgttcccatccccagaacaaatttgcgtcgagtgaaggacatctgattatcccctaatgcagtggctgcaactgtccaccctatccatgacatctccctgaaatttcaggggttctgaaactgctctacctcgaaccattcgcataagccataagccttgccataggtcataaatcgctcgctaaacaagtacaacaccgccgtgctactctccacctgccgtatatcggcatattcaggtgcaacatccatcgcggcgatcgcggcttcaatctgcgcttcctggaagtaatatggcgcttgcatcagcatggcgactttgtaaggacgaggatacgtctggcactcaaaacgaacggcgtgtgcaatggcgcgacaaatgtcctgctccacaacttgcaaagacatcgccgcgtagttttcactcatggcctgcgtactgtaatagtaatcatccttgcttcccgtcaaacaagcgatatccgcgtagtctccgttctgcttaatgctttccagcaaaacactcagttcctcttctgcaaccaaatagggtgggctgagaaacacggcgcgcgccaccagctgcccagccgcagaatgctggcgaatgaactcagccaggatttcagcaggttctggttcggttaccgtatcaacggggtgacgcatcccctgcaaccattgccgcttcgcctcgtcaacttcgctgactttcgctaacggcaattcatcctgatggttcatcttacccattccttacgcaggcagtagattgtgtgctgccagatcggcggcaatatcttccagccccagacgctgcaatgtttcgcgggttggacaaccaagctgtgggtcccagcccatttctttgtagaacatcgtgaggctagcatgcatatcgtcacgatccattttgtcagtaccttcagtaaagaccgggatctgcggatccttgtcgaatacccaggaacagataagatcgtgttcattacgcatatctttggtttgcatcagttttaccgtgtaggcacgatgcaacgtaaaaatacgctctgcagctaaatctaatttttcctgagtcatctcttcgccggtgatcgctttgaagaatttggcttcaagcgccagatcgccccggtaattacggcttttcagcgggctaacggtcattggccagacccagttgcacagggtgacggcgttatgcaaacagacccgcaacaggctccactttgcatatttaatttttgcgtcattgattggcgtgtagtttttggtttcatcgtaagcatcttcagaaccaaaaagttctttcgccacttcacgttgcagtttcaatggcaagccggaaccaataaagttgatatgggtatgcgtcatgcagtcacggttgaacatacagttaacaatggaaccgacctgcgcactcgcttcattggcatggtgaaccggatagccaaacgggctccagagtttatttttcgcgtagccccagtactcttcacccaaattccagcgttctgcgatggcataactaccatcagccaggtgactcagctcacccacacgatgcgccagacggtagtaaaaatctttaatgaagttaacgtcacccgcttccagttgatcccagcgaatttctgcatactcttcagctggcagaacacgcttgaacacacctttgctgtaacaataagtaaagtcgcgatgcaactgcccgtagttacaccataggccgtagtcatcgaacaaattcagacccaccaggttaccaatcacacgaccatcgtctttatcttcaaaatctttcggcccgttcgggaagatggtggtatggacaaagtttgctacacaagtgttaccacctgtgctgggcacgccaaactctttcacccgaggaatattcatttgggtcatacaacggatcgggcaagagtggcagccgctcatttttactgtgtatttctctgccgccggtcctaagtcaaaaacggatttataggtacgaaagccgaccgtattctgattgcctggcggaatttcacccgtttcaatcggaccaccttcagccgcgccccaaaacagccctttacgtgctgtccagcgactcttgggatcactatactctgcccagctttgtggcgtacttggcacgacatggttgttattcgcaccaataagttcagtcatcatgtaatcattgagacgcttcatctcctgacgatcggcaatgttgacccctttcgtcccttcaaccgcaatcgctttcaggtttttgctacccattattgcgccagttcccgcaccgccgctgtggttacggctattcaacatgccagagagaggaacaaggttttccccagcctgaccaatagccgccacacaggtttccggactggtcaatcgacaaatttcttccgtcgttgcgcgcgtcccttttccccataagaaatcggctttttccaggctaactttgtcatctttaatcttcagccataccggacttttcgccttcccttcgataataatgacgtcgtatccagcgaatttcatttgcgctgcaaaaaagccacccatatgggcatcgacgactaaatttcctttggtaaaagtagaaagactggtgatatttacgcgagaactacagggggcaccagatccagttaatgggccggtagcaaagactaatttattcgcttcatcgaaaggtttcgtgcctggcggtacttcgtcatacataattttgtagccgaagcccatgccaccgacaaaacttttaaacttactggaatcttcgagggtaatatttcctgtcgtgagattgactcttaatatattacctgtccaaccgttagccatgattttttcctttgcaagattcacacagtaatatctttccactcgataatttttaacgcccctgttgggcaggcgtttgcgcattcaccgcataacacacatttgctggattttttactttcggtatttacggtggccatcatccacgggcatgccgtagtacaggcgctacagccaatacagcgtttatgatcgacggtaatacagccttctttctgctgccaggtaatcgcaccaatcgggcagacgttcatgcattgcggctctttgcattgacggcaggtgtccgcggtatagttgagatcgccatacaggccgccgccagagccaaccccgttgtcgccaaagaaataattgcgatggattttgatacgggagaagaatgtccctacactgccatcgttgaagttggtacaagagatttcacagcggtggcaacccgtgcatcgcgctcgctgggtcaccagcacccctttgggggtatttatcaaccctactgtgccgctatcaatatcttcctgtttgcaacccaaaagactcagtaacgcaggggcaattgttagaccagcaaggccttttccacttatacgcaagaattctaatcgcgttaagccaatatctaatagtggacgatcaaccgggttcatttatttcgcatcctcttcgcaaacacagtgctgacaattcagcagcctgatattaagcattcaactaatacgctgctgactctgtccccaacaccagatattttccctaacccgatagtgtatgagaaaagattaacgccgataaactaatcctttatggttaggagaaaaaataatgtgattattctgagcccttaacattgatcgttatcaattaaaattacaaagcaagaaattataagtgaactgatatttattatcatttgaaataaatttaacttaagcgacaattatttgtgactttcattgcagaaaataaaaataacattatcgctataaattaaaatacataccgaaattcgtataatttcagcagttgttatttagaatgattaactggaccgcaactgaagcaagaatatcaggatgaagcttaccgcctcatcctgaatggtcattttaccagtgcgttaatgacggtttccatcgcctgcttttccagctcactgcgctgaatgcgtttattggctaatgctgtacgtaatacgcctgcgataacaatatgctttggttcctgccccagatcgcgcatttccagcacaactttaccgacaactctgcacatttctcggtacagttcatcctcttttgtccgatttcccattctttatacctatttatcatgccaactatcagcatatatcaatctaaccaattaaacaaaaatcaaacaaaatcagacaaataacgcgataaattattttaactgtagcaattgagcgatgatatatttatacaccggatgaactttcacttatcctcacactgacaacttcggcaccagacgttgcgcaaacagtgaagtttttgcgtaaccttttccctggaacgttaaatctttgataacaatttattgtctaacaagttgtatattttttgaaacgctgtttttgttttccttttggattaatttcagcgtataatgcgcgccaattgactcttgaatggtttcagcactttggactgtagaactcaacgactcaaaaacaggcactcacgttgggctgagacacaagcacacattcctctgcacgctttttcgatgtcacctatccttagagcgaggcaccaccactttcgtaataccggattcgctttccggcagtgcgcccagaaagcaagtttctcccatccttctcaacttaaagactaagactgtcatgaaaaagaccaaaattgtttgcaccatcggaccgaaaaccgaatctgaagagatgttagctaaaatgctggacgctggcatgaacgttatgcgtctgaacttctctcatggtgactatgcagaacacggtcagcgcattcagaatctgcgcaacgtgatgagcaaaactggtaaaaccgccgctatcctgcttgataccaaaggtccggaaatccgcaccatgaaactggaaggcggtaacgacgtttctctgaaagctggtcagacctttactttcaccactgataaatctgttatcggcaacagcgaaatggttgcggtaacgtatgaaggtttcactactgacctgtctgttggcaacaccgtactggttgacgatggtctgatcggtatggaagttaccgccattgaaggtaacaaagttatctgtaaagtgctgaacaacggtgacctgggcgaaaacaaaggtgtgaacctgcctggcgtttccattgctctgccagcactggctgaaaaagacaaacaggacctgatctttggttgcgaacaaggcgtagactttgttgctgcttcctttattcgtaagcgttctgacgttatcgaaatccgtgagcacctgaaagcgcacggcggcgaaaacatccacatcatctccaaaatcgaaaaccaggaaggcctcaacaacttcgacgaaatcctcgaagcctctgacggcatcatggttgcgcgtggcgacctgggtgtagaaatcccggtagaagaagttatcttcgcccagaagatgatgatcgaaaaatgtatccgtgcacgtaaagtcgttatcactgcgacccagatgctggattccatgatcaaaaacccacgcccgactcgcgcagaagccggtgacgttgcaaacgccatcctcgacggtactgacgcagtgatgctgtctggtgaatccgcaaaaggtaaatacccgctggaagcggtttctatcatggcgaccatctgcgaacgtaccgaccgcgtgatgaacagccgtctcgagttcaacaatgacaaccgtaaactgcgcattaccgaagcggtatgccgtggtgccgttgaaactgctgaaaaactggatgctccgctgatcgtggttgctactcagggcggtaaatctgctcgcgcagtacgtaaatacttcccggatgccaccatcctggcactgaccaccaacgaaaaaacggctcatcagttggtactgagcaaaggcgttgtgccgcagcttgttaaagagatcacttctactgatgatttctaccgtctgggtaaagaactggctctgcagagcggtctggcacacaaaggtgacgttgtagttatggtttctggtgcactggtaccgagcggcactactaacaccgcatctgttcacgtcctgtaatattgcttttgtgaattaatttgtatatcgaagcgccctgatgggcgctttttttatttaatcgataaccagaagcaataaaaaatcaaatcggatttcactatataatctcactttatctaagatgaatccgatggaagcatcctgttttctctcaatttttttatctaaaacccagcgttcgatgcttctttgagcgaacgatcaaaaataagtgccttcccatcaaaaaaatattctcaacataaaaaactttgtgtaatacttgtaacgctacatggagattaactcaatctagagggtattaataatgaaagctactaaactggtactgggcgcggtaatcctgggttctactctgctggcaggttgctccagcaacgctaaaatcgatcagctgtcttctgacgttcagactctgaacgctaaagttgaccagctgagcaacgacgtgaacgcaatgcgttccgacgttcaggctgctaaagatgacgcagctcgtgctaaccagcgtctggacaacatggctactaaataccgcaagtaatagtacctgtgaagtgaaaaatggcgcacattgtgcgccattttttttgtctgccgtttaccgttactgcgtcacgcgtaacatattcccttgctctggttcaccattctgcgcactctctacactaggcgcattgctggctgcgggagttgctccactgctcacgctaaccggataccctgcccgacgatacaacgctttatcgactaacttctgatctacagccttattgtctttaaattgcgtaaagcctgctggcagtgtgtatggcattgtctgaacgttctgctgttcttctgcgcttagtggtcgatgtacttcaacataacgcatcccgttaggctccacggaatatttcaccggttcgttgatcactttcaccggcgttcccgtccgcacgctggagaacaaggctttaatatccggtgcattcatgcgaatacacccactactgacgcgcaaaccgacgctgtccggcgcactggtaccatgaatgaggtattcgccattaccatgcgcgaggcgcagtgcgtaacgtcctagcgggttatttggtccggcaggaacgactggcggtaatttaatgccacgctccaggctacgctgacgaatgcctgccgtaggcgtccaggttgggttagggattttctgcccaacacgcgtttccatcaccggcgtttccagcccctgcaatccaatacctattggataaacctgcacaatattttctcccggcggataataataaaggcgcagctctgcaaggttaacgataatcccctgacgcggtgcatcaggtaataacagttgactaggaatagttatcgtcgtaccaggttttggcaccggggcgatagtgttattggcttcaaggatcaacattgccgcagtatcaaaacgtcgggcaatagcctgaaggtttttatccccttcttgcaccgtatacgtttgattttgcccaaccagtcggcttccggttggtggtagcggataatcaaccgcccaggcagcctggatggcgctaaaagcgccgataagcgtgagtgtaagcaaagacgcgcgtttcattgtaaacctcctgtatttgccggagactcacgctgaaacgtcggatggcgcttatgttcacctgaaaccaaaacactcctgtgcaggtcagtgtaaacattgaccatccggcaatgtgagccaaccggatgaaagctgtccttttagtttagctaagtgcagcggctttggcgcgaattgcgcgaatcatcgcttccagaccttgactacgagatggggtgagatgttgggtgagcgccattttttcaaaccacggacgcacatcgaaattgacaatatcctgcggcgtcatctgatcgtagagaataaagacgaccgcaataagccctttcacaatcgccgcatcgctgtcgccctgtaattcaataattccctgggcattctggcgcatgacaatccacacctgactctgacagccctgaatgctattttgtggacttctgtcttcgtcgcgtaattctggcagacgctggcccagctcaataatgtagagatatttctcttcccagttggcgcagcgtaaaaaattacgcagcaacttttctttatccggcaataaagccatagtgcctccctgttatcccagcaaacggtgaatacgttgcaggccggtcaccagacgatccacttcttcatgggtgttatacatggccaggctcgcccgacacatcgcagggacgttgtaataggccatcaatggcattgcgcagtgatgtccggtacgcacagcaatgccgtaattatcgagaaaactgccaacatcataggcgtggtgtttaccgagattaaaagcaataacgccaagcctgttttgtgggccatagagagtgagatccggtacagattccagctgacttagcgcataatgcatcagattctgttcatactcggctatgttattaagccccagcgcgctaacatactccagcgccgcgccaagaccaatgatgcccccggtattgggtgtaccggcttcaaaccgccatggtgctttggtccaggtagtgccttcactcaggctgacggtggcgatcatagaaccgcccccttcccacggcggcatctcctgcaacaaggcttctttcacataaagaatgccaattccggtggggccatacagtttatgcccggagaacacgtaaaagtcgcaatccagcgcctgaacatccaccggatgatgcatcaccgcctgagcgccatccaccagcacttttgcgccatgctggtgcgcaagcgtgatcatttccgccagtggattttctgtgccaagcacgttggagacatgagtaattgccagcaggcgagttttctcatcaaacagcgtaggcagcgtctccagttgcaacgtaccatcgggattgagcgggatcacacgcagctctgcgccaacgcgtgcgcaaagcatctgccagggaacaatgttagcgtggtgctccatctgactgatgatgatgttatcgcccgcccgcacgttgctgttgccccagctattggcgaccagattgatcccttccgtcgtgccgcggacgaacaccagctcttccgcgctacgggcattaataaacaggcttgcccgcttgcgcacgttctccattttctcggtcgcctgggcgcttaaggtatgaataccacgatgcaccgccgcgtagccatgacgataaaactcggcctcggcgtcaatcacctggctcggtttctgcgcactggcggcgctgtcgagataagccagcggcaaaccgtttacctcacggctaagcaccggaaagtcggcccgcactttgtcgacggaaaaaatcatcttgcacctcctggcagccgttgaccgattcgggccagcacctgctgtttaagcccctcatcacgcagtgcttccgtcagttcggcagcgaaggcgtaaatgatcatctgctgggcatcctgctgattgatcccgcggctgcgcagatagaatatctgttcatcatcaatacgccccaccgtcgcgccgtggctgcatttcacatcatctgcatagatttccagctgcggtttcgtatccacttccgccagtttgcccatcagcagattgttgttggtcatctgaccatccgttttgatggcgtgctgcgcgacgttgatcaaaccgttaaataccgcgcggcctttgtcgctgacgatagttttgtgcaactgtcggctgttacaaaaacctttattgtgttccagccaggtacgggtatcacacacctcgtttttcaccggcatcgccaggctattgatccgcagcgtgctgttttcgccattgagttgcgtactggtgttgtgtcgtaacactgcgccacccagcaggaaactgtggctaaatgcggtggcatcctcagccagcaacaaatcgttatgagcaaagtggtgactgagcgggttttcaaacgccagcttgatatgctgcaagtgggcattcgctgcgacgttgatagtgaaccgtgccccggtaaaatgacgagcatcattcaggctgacaaaatgttcgatcaccgttgcttcggcaccttccgccagatccagatgatgtcggtaatgggcagtgttcacctcttcacctgccacgccctgggtgatatgcattaacagcaatggctttgccggccgttgaccgcgcttcacggcgatatgcgtcacgctttgtgccaggctttccgtcaaatgcagaaacacttccgcctgaatagcgtcgggtaaaccctgacggtcgtcgttaatgctcacttcatatccgctgccttcagttgcatcgctcagtgcgggcacgtaacgcccatcgacaaacaccagccgcacggagtctaacgttaacgctaaggcattacgctgctgtggggatatctctcccgcaatgctgacaaactggctattgatcagcccttccagcggcgtatatttccagttttcatgtttacgtgtcggcagtccggtacgcagcaattgttgtaaatgctgctgtgcttgcggggagcgttttgtcccttcagcttcaaacaagtgatgccactgttgcagcgcgttactgctgttcggtaagccagccataaccctgctcctccagttgtttgaccaacgtgaaatcgccggatttcacaattcgtccctgatatagcacatgaacgtaatcaggcttgatgtagtcgagaatgcgttggtagtgcgtaacaatgatgaaactgcgcttgccatcacgcaggctgttcacgccatcggcgaccacttttaatgcgtcaatatccagcccggagtcgctctcatcaagaatgcataactccggttccagcaccgccatttgcaaaatatcgttgcgctttttctcgccgccggaaaaaccaacgtttacgctacgggttaataaatcttccggcatcttcaggagagcgattttctcttccatcaaatcctgaaaatcaaagcggtcgagcgtttcctggccgcgatagctgcgcaccgcattaagtgccgtttgcaggaaaaactggttactgacacctggaatctccaccggatactggaaggccataaagatgccttcgcccgcgcgatcttccgggctcagcgcaagcaaatctttgcctttgaactcaaccgtgccgcccgtcacttcataatcttctcgcccggcaagcgttgcgcttaaggtacttttgccgctaccgtttggccccataatggcgtgaacttcgccgggatgaacgtcgaggcttaatccgcgcaggatagctttatcttccacgctgacgtgtaaatctttaatacttaacatgtttattccttatccgacgctgtgttcaagactgatggcgaggagtttttgtgcttcaacggcaaattccaacggcagctcgctgaacacgtctttgcagaaaccgttaacaatcatgctgatggcgtcttcttcgctgatcccgcgttgcaggcagtaaaacagttgatcttcaccaatacgacttgtcgttgcctcgtgttccagttgcgcactattgttacgacactcaacatacgggaaggtatgcgccccacaattagcgccaatcagcatactgtcgcactgagtgaaattgcgcgcattggttgccgtcggcatgattttcactaagccgcgataactgttctgactatgtccggcagagatccctttgctgataatggtgcttttggtgtttttaccgatgtggatcatcttggtgccggtatccgcttgctgatgaccgctggtcagcgccacactgtaaaactcaccaatggagttatcgccgcgcaaaatgcagctgggatatttccacgtaatcgcactcccggtttcactttgcgtccaactcattttgctgttttcgccttcgcacaaagcacgcttggtgacgaagttgagaataccgccggtgttgttatcgccaggaaaccagttttgtaccgtggaatatttcacctcggcgtttttatggatgatgacttccaccactgccgcgtgtaactgatagctgtcacgcaccggagcggaacagccttcaatgtagctgacgtagctgtcttcgtcggccaccagaatggtgcgctcaaactgcccggttttttctgcgttaatgcgaaaataggtggaaagttccatcgggcagcgcacgcctttaggcacataaataaacgtaccatcagaggctaccgccgcattaagcgcggcaaagaagttgtcattccccggcaccacggtgccgagatatttacgcaccagttccgggtgatcgtggatcgcctcaccaaaggaacagaaaataattccctgctccgccagtttttcgcgataagtagtggcaacgctaacactgtcgaaaatggcatccaccgccacctctttgccttcccgcacgggaacgcccaactgctcaaacgccgcctccacctctttacttaaaaaggcgttcgcgccagtttgctgcaccgcgccaggttcagacgcgcaagtgtcgtcacaattaccgcagcttggtgcactgtagtagctgtaatcctgataattcagcttgtcgtagtgcgctttcaaccagtgcggttcttccatctccagccatgcgcgataggcgtttagacgaaactccagcatccactccggctcattacgcttcgcgctaattgcgcgcaccacctcttcgtttatcccctttgccagctcatcggtggctaactgggtgaagaatccttctttataattcagcgggccgccggtccaggttttgacatcgtcagttgcttcagtattacgagacatagtaccgcttataccccaaagctttcgccacagccacattcattctgggctttagggttgtgaaatttgaatatctgattaagtccttcacgaacgaaatcgacttccgtgccatcaataaacggcatcgcttgcagcgggacaaacagcttcgcgccgtcgtgttcaaacagcagatcgtctttgtccggctcgctaacactgtcgagcacatagccaaagcccgcgcagcccgtttgcttcacgcctaagcgcacgccgaccatacccggctgctttgccaccagctcacggatgtgtatcgccgctgcgggtgtcagcgttaagccttgccaggcgaaatcttgtgggttaaaggttccactatgcatgtccatcgatttacctcacttcatcgctttcagcgtataacagcatgttagtgataatgattatcagttcaacccagcaaacgcaggggctttaccgtaaaacatgctttttgcctgcttttaataagcatagaccctgatgtgtgggttaacaggcacgctaagaattaggtatctcattgttagataatggttattatctaaggagcattaaggctgtgatgaaaaagaaaaagttgtattgaaaatgactatttaagagataggtaaaaaagtgcagcgttcagaaataagaaaacccttaagtctgtgcgacacaggcttaagggtttctaccccatccggcgcttatctccggcactctcagtggcttagctcttgaaggggcgataagaataatctcataaagctaacccgccgttttaacacaaactgcgattagtattatttttgaacaatatcaggcggtagataagcagtattaagaaggtcatcgaacctggacggaggttaatccaggtcgatttggcgaacttgcggcattaagtcaggatcaatgcacgcccagacgccaggcaaagtagatttcttcttttaattcagcagaagagagagtaagcaggtcagcaaattcaagttctagttgtttcagacgtttgagatattgggcaggactaagattgctctggtcacggcgtaaaaattcaatggccagctgggtgggatcaagttgagtagacatagcatcctcgcttttagacaagacctgcacagtataccaccgtttactgtgcagataatgaccaaaagcaatatgcgtcacacttttctggtgacaacgtcacaaaatggcggtcgtcaatcgactgctacagcacaaacgccctttctcatcgaagatttcaatctgccagacctggtgacggctaccgagatgcaacggtttgcatacgccgcgcacccgcccttctcgtgcgctgcggacgtggttagcattgatttccagaccaaccactttttgctcaccttcggtacataaataaccggcaacggaaccgatactttcggccagtaccacggatgctcctccatgcagcaacccgaaaggctgctttgtccggctgtctactggcattgtcgcttcaagggtgtcatcaccaatatgttcaaagcgaatatccaggaaccccaccatgtttccttcacccatagcattcagtgcttccagggtgattttccgtttccatatcatttaataatctccagtaaagcctgcacaggatggcgtacccccgtgccttcaacccgttttacctggctacggcaggaatatccggtcgccagacagcggttacgcggcagtcgctgcatagcctgatgccaggataactcatagatcccgaggctattttcatggtttttcgcttcatgtccgtaagtccctgccatgccgcagcaacccacgctgacattttccagtttcgcgccaaaacgggcaaatatcgcggcccattgtgctggcgcacccggcaaggcggtaacttcggtacagtgaccaaagaaataccaactttcaccgctgactgtagccactggctgactctcaagtgcgcttgccagccattcattcgccagtaagacgttaaactcgccacgctcctcgcccagcgccagtttatattcatcgcgataacaaagtaccagcgccggatcgacgcccaccattggcatacccagcttcgccatacggttgaggaaatccgccgtctttttcgccgtcttcgcaaaacgattaagaaaacctttaatatgctgggctttgccatttgggctaaatggcagtaacacaggctggaaacctaatttttcgaccagacggacaaaatccgccaccacttgcgcatcgtaatagctggtaaaggggtcctgcaccaccaacactgtgcgcgctttctgctctgcattgagagattcaagctgttccagcgtcatgtttgcgctgcgatgccccaccatttgttgttgtaggctggggacgctcagcagcggcaaatcaaccatgccgatatgtttttcgctgagtttgcgcaccagcggctggttaatgaagaagttaaaggttttcggcgcgcgtgccatcagcggcgcgtagctctcgaccgtagcgacgaggtggtcgcgcagcgggcgtaaataacgggtgtgatagagctgcagaaaacgagagcgaaactccggcacatcaattttgatggggcactgggtgctacacgctttacaggccagacagccgctcatcgcctctttgacttcgtgactgaagtcatattcgcctttattcgcatgccagctattgcgcgtgcgggcaattaacgtccgcaaactgacgccggattcaggcagttcttgttccagtttgagtggatcaacgccgcgatccgccaacaaacgcagccattcacgcaccagcgttgcgcgccctttcggactatgaatccggttctgggtgatcttcatgctcggacacatcggactacgggcatcaaagttgaagcataaaccgttgccgttacactccatcgcaccgcgccactgctggcgtaccgcaatggggatctgccgatcgaatgtaccgcgcttcaccgcgtccactttcatcatcggcgcatcgagaccttctggcgggcaaatcttccctgggttgagtcggttatgcgggtcaaatgccgctttcactttgcgcagttctgcaaaaagttcctcaccgaaaaacgccgggctgtattcagcgcgaaaacctttgccgtgctcgccccacaacaaaccaccgtatttcgcagtcagcgccaccacgtcatcagagatttgcttcatcaaaatctcttgttgaggatcgcacatatccagcgctggacggacgtgcaagacacctgcgtcgacgtgaccgaacataccgtagcttaagccgtggctgtcgagcagcgcgcgaaattcagcaatataatccgccaggtgttccggcggtacgcaggtatcctcagcaaacggaattggcttagcggcacctttggcattgccaagcagaccaacggcttttttgcgcattgcatagatacgttcaacccccgccagctcacggcacacctgccagccgatgacacctgcttgatgactggcgatcagctcatccaaccgcgcacagagtgcatttacccgctcatcaatcagcgcctcatcatcaccagcaaattccacaatgttcagcccgagcatctcttggtcaggcacatcggtaatcaactcgctgacggaatgccagacaatatcttcccgcgccagattcagcactttactgtccaccgtctctacgctaagcgcccgcgcctcaaccataaacggcgcgttacgcagcgcagagtcaaaagagtcatatttgacgttcaccagacggcgcactttaggcaagcgtgtaatatccagccgcgcttcggtaataaaggccagcgtcccttcactacccgtcagaatgcgcgtcaggtcgaactcggtcatctcatcgttaaagacatgacgcagatcgtaaccggtaagaaagcggttaagtttggggaagttgtcgataattaactggcgttgctgacggcaacgttgataaaccgtgttataaattcgcccgattgtggtattggatttacccagcgtttccgccaattcgacgggtaaaggttgcgtatcgagaatatcgccccccaacaacaccgcgcgtacgccaagtacgtgatcactcgttttgccatagaccaggcttccctgaccggatgcatcggtattgatcatcccaccgagcgttgcccggttgctggtgctaagttccggcgcaaaaaagtagccgaacggtttcaggtactgattgagttgatcttttatcaccccggcctcaacgcgcacccagccctcttcagggttaatttcgatgatgcggttcatatggcgggacatatcaacaataatcccctggttgagcgcctgaccgttagtgccggtgccgccgccgcggggggtaaagatcaggctactatagcgttcctgcgcggcaagacgggcgatcagcgccacatctgcggtactacgcggaaataccaccgcatcggggagaagttggtaaatactgttgtcggtgctcattgtcagacgatcggcataacttgtcgccgtatcgccggtaaaaccttgttgctccagctcttgcaaaaaattaagcaccagttgaacgacgccgggtgcctgggaaatctgtggaatcattatattgaccctttcctgcggtctgtgatgtaggtcgatacactattctttcaggctgctgcaatagcgcactgaaaggtgatgtttgtttactctatggatttcgtgttgcaggaaggcggcaagcgagtgaactccaggagcttacaatagtaagtgactggggtgaacgaacgtagccgcagcacatgcaacttgaaatacgacgagtaaatcgtttgcgtgttgcctgagttgttgtaccacatttttttctaacacgcccatcagaattaagggcagaatcggcctgttaaaaaccgctgaaattgctcatcattatgcaggtgagtttcgcgtgttcacgtcgcgtcgacgatttgacgcacaaaaaaggtgaaaagtagttatggtaaatgttcgtcagcccagggatgtcgcacaaattctgcttagcgtgctgtttttagccatcatgattgtggcatgtctgtggattgttcaaccctttattctcggctttgcatgggccggtacggtggttatcgccacctggccggtattgttacgtttgcaaaagatcatgtttggccgccgctctctcgccgttctggtgatgacgctgttattagtgatggtgtttatcatccctattgctttgctggttaacagtatcgtcgacggcagcggcccgctaattaaagccatttccagcggtgacatgacgttacccgatctggcgtggcttaataccattccggtgattggcgcgaagctgtatgcaggctggcacaacttgctggatatgggggggacggcgatcatggcgaaagtccgcccttatattggcaccaccaccacctggttcgttgggcaggcggcgcatatcgggcgctttatggtgcattgtgcgctgatgcttctcttcagtgccctgctgtactggcgcggtgaacaggtggcacaaggcattcgccattttgcaacccgtctggcaggcgttcgcggagatgccgccgtgctgctggcggcacaggctatccgcgcggtggcgctgggtgtggtggtgacggcgttagtacaggcagtgcttggcggtatcggcctcgccgtatccggcgtaccttatgcaacgttgctaacggtgttaatgatcctctcctgccttgtccagcttggcccgttgccggtactgattccggcgattatctggctctactggactggcgataccacctggggaacggtattgttagtgtggagcggtgtggttggcacgctggataacgtcatccgcccaatgttaattcgcatgggtgccgatttaccgctgatcctgattctctctggcgttattggtggtttgattgctttcgggatgatcggtctgtttattggtccggttctgttagccgtttcctggcgtctgtttgccgcgtgggtggaagaagtcccgccgccgacggaccaaccggaagaaattctcgaagaacttggcgaaatcgagaaaccgaataagtaatttctcatcaggcggctctgccgcctgattgttaaccaccgctaattgatatttgcttgctcttccccatattttcctgcttaccgccattcagctggtagtacctgtcgcaaattctttacagtttttaaactaatgagacgaatctgatcgacgcaaaaagtccgtatgcctactattagctcacggttataaatcaacatattgatttataagcatggaaatcccctgagtgaaacaacgaattgctgtgtgtagtctttgcccatctcccacgatgggcttttttttaacatttttccgcttcgctacctcgcccctcactctttccaataatgttgcacaagatactgtgactctcttcaagccgtcagcaggctgataatgttatttatattttattgtttatttcatgcagccattacacgatgaacgcttatgaactccaggcactccgccatatttttgccatgactattgatgaatgcgcgacctggattgcccagaccggtgacagtgaaagctggcgtcagtgggaaaatggcaagtgtgccattcctgatcgtgtagtcgagcaactgttggctatgcgtcagcaaagaaaaaaacatcttcatgccatcatagagaaaataaataaccgcatcggcaacaacaccatgcgttttttccccgacttaaccgcatttcaacgagtctaccctgatggcaattttattgactggaagatctatcaaagcgtagctgctgaattatatgcacacgatctggagcggctttgttaatttttccacagaaaggaattgtcgttgttacaacaataatgaacggatgctgacacaacatcgcttcactttttaaagcacctttgctaagtagaacctatgaaaaatccctatttccctaccgcacttgggttgtattttaattacctggtgcatggtatgggcgtccttttgatgagcctgaatatggccagcctggagacactttggcagactaatgccgcgggtgtcagcatagttatcagtagcctgggcattggtcgattaagtgtcttgctttttgcaggattattatccgatcgctttggtcgccgcccttttatcatgctcgggatgtgctgctatatggccttcttttttggcatcctgcagaccaataacatcattatcgcttatgtttttggctttctggcgggaatggcaaacagttttctcgatgcaggcacttatcccagtttgatggaagcttttccacgcagtcctgggacagccaatattttaattaaagcatttgtttccagcggacaatttttattaccgctaatcattagcctgttagtgtgggctgaactgtggttcggttggtcctttatgattgctgcaggcattatgtttattaacgctctgtttttataccgttgtacgttcccaccccatccgggtcgtcgcttacctgtcataaagaaaaccaccagctctacggaacatcgctgtagtattatcgatttagccagttataccttatatggctatatcagtatggcaacgttttatctggttagccagtggctggcacagtacggacaatttgttgcaggcatgagttacactatgagcatcaaactactcagtatctacaccgtgggtagcctgctttgtgtatttattaccgctccactcattcgtaataccgttcgcccaacaacattactgatgctgtacacctttatcagttttattgctctgtttaccgtctgcctgcatcccacattttatgtggtgataatatttgcttttgtcattggttttacctctgctggaggtgttgtgcaaattggcctgacgttaatggctgaacgtttcccttacgctaaaggtaaagctacagggatctattacagtgcgggcagtattgcgacctttactattccgttgattacggctcatctgtcccaaagaagtattgccgatattatgtggttcgataccgccatcgctgccatcggttttttactggcactgtttatcggcttacgcagccgcaaaaaaacgcggcatcacagcctaaaggaaaatgtcgctccgggtgggtaatgcaatattcttttcaggtcatgcaagatcttacggataaataactctttctgcgctaactaaggaaaatcgcgatcaaaaacaaactatgacatgcaatattcctggaaacataaactttatgccatgtacccagggaaaatcatcttcagtatagtaattatgtaaaccgtcggagaacaatacgtacggtaacgaaattatctttcagcaaggagctgtgaaaatgtctcaaaataaggctttcagcacgccatttatcctggctgttctttgtatttacttcagctacttcctgcacggcattagtgttattacgcttgcccaaaatatgagttctctggcggaaaagttttccactgacaacgcgggcattgcctacttaatttccggtatcggtttggggcgattgatcagtattttattcttcggtgtgatctccgataagtttggtcgtcgggcggtgatattaatggcagtaataatgtatctgctattcttctttggtattcccgcttgcccgaatttaactctcgcctacggtctggcagtgtgcgtaggtatcgctaacagtgcgctggatacgggtggctaccccgcgctcatggaatgctttccgaaagcctctggtagcgcggtcatactggttaaagcgatggtgagttttgggcaaatgttctacccaatgctggtgagctatatgttgctcaataatatctggtacggctatgggctgattattccgggtattctatttgtactgatcacgctgatgctgttgaaaagcaaattccccagccagttggtgggcgccagcgtaactaatgaattaccgcaaatgaacagcaaaccgttagtctggctggaaggtgttagtagcgtactgttcggtgtagccgcattcagcaccttttatgtgattgtggtgtggatgcccaaatatgcgatggcttttgctggtatgagtgaagctgaggcattaaaaaccatctcttattacagtatgggcagcttggtctgtgtctttatttttgccgcactactgaaaaaaatggtccggcccatctgggctaatgtatttaactctgcactggcaacaataacagcagccattatctacctgtacccttctccactggtgtgcaatgccggagcctttgttatcggtttcagtgcagctggcggcattttacagctcggcgttagcgtcatgagtgagttttttcccaaaagcaaagccaaagtcaccagtatttatatgatgatgggtggactggctaactttgttattccactgattaccggttatctgagcaacatcggcctgcaatatatcattgttctcgattttactttcgcgctgctggccctgattaccgcaattattgtttttatccgctattaccgcgttttcattattcctgaaaatgatgtgcggtttggcgagcgtaaattttgcacccggttaaacacaattaagcatagaggttaaaggagttaattatggatgttaccgcaaaatacgaattgattgggttgatggcctatcctatccgccacagtttaagccccgaaatgcagaataaagccttagaaaaagcgggattgccatttacctatatggccttcgaagtggataacgatagctttcctggagcaattgaaggattaaaagccctcaaaatgcgcggaactggtgtaagcatgccgaacaaacaactggcgtgtgaatatgttgatgaattaacaccagctgccaaactggtgggggccatcaacaccatcgttaatgatgatggctatctgcgtggctataacaccgacggcacgggccatattcgcgccattaaagagagcggttttgatatcaaaggcaaaacgatggtgctgttaggggccggtggtgccagtacggcaattggcgcgcagggggcaattgaaggtttaaaagaaattaaactctttaaccgtcgggatgagttcttcgataaagccctcgccttcgcgcagcgggttaatgaaaacaccgattgtgtcgtcacggtcaccgatctcgccgatcagcaagcctttgctgaagccctggcttccgccgacattttaaccaatggcacaaaagtgggtatgaaaccccttgagaatgaaagtttggttaatgatatcagtctgttacatccgggacttctggtcactgaatgcgtgtataacccgcatatgacgaagttattgcagcaggcgcaacaagctggttgcaaaacgattgatggatacggcatgttgttgtggcaaggggctgaacagttcacattatggactggcaaagatttccctctggaatatgttaaacaggtcatggggttcggtgcctgacaggctgaccgcgtgcagaaagggtaaaaaatgaaaaccgtaactgtaaaagatctcgtcattggtacgggcgcacctaaaatcatcgtcagcctgatggcgaaagatatcgccagcgtgaaatccgaagctctcgcctatcgtgaagcggactttgatattctggaatggcgtgtggaccactatgccgacctctccaatgtggagtctgtcatggcggcagcaaaaattctccgtgagaccatgccagaaaaaccgctgctgtttaccttccgcagtgccaaagaaggcggcgagcaggcgatttccaccgaggcttatattgcactcaatcgtgcagccatcgacagcggcctggttgatatgatcgatctggagttatttaccggtgatgatcaggttaaagaaaccgtcgcctacgcccacgcgcatgatgtgaaagtagtcatgtccaaccatgacttccataaaacgccggaagccgaagaaatcattgcccgtctgcgcaaaatgcaatccttcgacgccgatattcctaagattgcgctgatgccgcaaagtaccagcgatgtgctgacgttgcttgccgcgaccctggagatgcaggagcagtatgccgatcgtccaattatcacgatgagcatggcaaaaactggcgtaatttctcgtctggctggtgaagtatttggcagcgcggcaacttttggtgcggtaaaaaaagcgtctgcgccagggcaaatcagcgtaaatgatttgcgcacggtattaactattttacaccaggcataagcaataatatttcggcgggaacaccctccccgccgaactaaaaaatatattcaatcgtatttaataaaaatatttcgtgagtctctgtgcgctaattctccatttggcgtagggaaaatcacatctgaatcaggaattaacaatgaaacctgtaaaaccacctcgtattaatggacgagtgccggtcctgagcgcacaggaagcggtgaattatattcccgacgaagcaacactttgtgtgttaggcgctggcggcggtattctggaagccaccacgttaattactgctcttgctgataaatataaacagactcaaacaccacgtaatttaagcattattagtccaacagggcttggcgatcgcgccgaccgtggtattagtcctctggcgcaagaaggtctggtgaaatgggcattatgtggtcactggggacaaagcccgcgtatttctgaactcgcagaacaaaataaaattattgcttataactacccacaaggtgtacttacacaaaccttacgcgccgccgcagcccaccagcctggtattattagtgatattggcatcgggacatttgtcgatccacgccagcaaggcggcaaactgaatgaagtcactaaagaagacctgattaaactggtcgagtttgataacaaagaatatctctattacaaagcgattgcgccagatattgccttcattcgcgctaccacctgcgacagtgaaggctacgccacttttgaagatgaggtgatgtatctcgacgcattggttattgcccaggcggtgcacaataacggcggtattgtgatgatgcaggtgcagaaaatggttaagaaagccacgctgcatcctaaatctgtccgtattccgggttatctggtggatattgtggtggtcgatccggatcaaacccaactgtatggcggtgcaccggttaaccgctttatttctggtgacttcacccttgatgacagtaccaaacttagcctgcccctaaaccaacgtaaattagttgcgcggcgcgcattattcgaaatgcgtaaaggcgcggtggggaatgtcggcgtcggtattgctgacggcattggcctggtcgcccgagaagaaggttgtgctgatgactttattctgacggtagaaacaggtccgattggcggaattactagtcaggggatcgcctttggcgcgaacgtgaatacccgtgccattctggatatgacgtcccagtttgatttttatcacggtggcggtctggatgtttgttatttgagttttgctgaagtcgaccagcacggtaacgtcggcgtgcataaattcaatggtaaaatcatgggcaccggtggatttattgatatcagtgccactagcaagaaaatcattttctgcggcacattaactgcgggcagtttaaaaacagaaattaccgacggcaaattaaatatcgtccaggaaggacgggtgaagaaatttattcgggaactaccggaaattactttcagcggaaaaatcgctctcgagcgagggctggatgttcgttatatcactgagcgcgcagtattcacgctgaaagaagacggcctgcatttaatcgaaatcgcccctggcgtcgatttacaaaaagatattctcgacaaaatggatttcaccccagtgattagcccagaactcaaactgatggacgaaagattatttatcgatgcggcgatgggctttgtcctgcctgaagcggctcattaacaggagtataatgatggatttttctttaactgaagaacaagaactgctgctggccagtattcgcgaactgattacgactaactttccggaagagtatttccgcacctgcgatcaaaacgggacatatccgcgtgagtttatgcgggcgctggcggataacggtatttccatgcttggcgtgccggaagaatttggtggtatccctgcggattacgtcacccaaatgctggcgctgatggaagtgagtaaatgcggtgctccggcatttttaattaccaacggtcaatgtattcacagtatgcgccgtttcggttctgcagagcagctacgtaaaacggcagagagcaccctggaaacgggtgatcccgcctatgccctggcgttgacggaaccaggtgctggcagtgataacaacagtgccactaccacttacacgcgtaaaaacggcaaggtctacatcaacggacaaaaaacctttattaccggtgcgaaagagtacccgtatatgctggtgctggcgcgcgatccgcaaccgaaagatcccaaaaaagccttcaccctgtggtgggtcgactccagtaagcccggcattaagattaacccgctgcataaaatcggctggcatatgctcagcacctgcgaagtctatctcgacaacgtggaggttgaagagagcgacatggtgggcgaagaaggaatgggtttcctcaatgtgatgtacaactttgagatggagcgcctgatcaacgccgcgcgcagcaccggctttgccgaatgcgcctttgaagatgccgcccgctatgccaaccaacgtatcgcttttggtaagcccattggtcataaccagatgatccaggaaaaactggcgctgatggcgattaagatcgacaacatgcgcaacatggtgctgaaagtggcatggcaagccgatcagcatcagagtctgcgcaccagcgcggcgctggcaaaactgtactgtgcacgtaccgcaatggaagtcattgatgatgcgattcaaatcatgggcggtctgggctataccgatgaggcgcgcgtctcccgcttctggcgtgatgtccgttgtgaacgtatcggcggcggtacagacgaaattatgatttacgtagcaggtcggcagatcctgaaagactatcagaacaaataatctgcaggcggcgcagcttcttaacaaactgcgccgccagatttatccaacaagacttaccggttgaggaaattcagataggatttcttgttccgcaaaacagtttttaaattgtctacggtaatcgctggggctacaaccgacatggcgcaaaaacagtttggcaaagtgatcgacattttcataacccacacgccaggagatctctgcctgacttaattcagtattagtgagactccattttgcttccgtcatacgccgttgaataacatagttaataggggaaatacgatactctttggtaaattcatggcaaatataactgacgctggcacgaaattttttgcttaactgttctaaagtgattttttcgcgataattattattcagatagaaaagaatatcttttatcagaacatcttttttaatatacccctgctcgctacgataagcatttttaaaattttcgtagtaaagaatggctaacgtataggcaaatgcatcccataagctagatgtttggctatttttactttgcggcaaaatcacacttagctcattaaataaggtttttatgacttcttttccctgccccgcggcaattaccggacaagaatgcggttgcagtagctgattttcctcagccccctgaaactgaaagccgtacagcgcacaggtacacgtcgttgccggatcgttaacgtcagaggccaccgcatgcagcctgccgcgttctatcaccacaatgtcatccgcatgtgcgacatataagctagaatcgatggtaaaccttgcaacccctttcttgacgtaaatcaactcggtttcattgtcatgaacgtgatgtccggactcccattttggatcatcgctaaatgcaaaacgactaagccgtggcgttttaccggcgacaaacagcgtttcactggcgttatcaaaacagcgttgatacatgacaacctccctattccatgagcaagcaaaaacaatatatgccggataaaatacggcgtgtattgcggttatacaaccgcgtttagcgagagctaaacaagattatttacactgaatgcaagattgtacggtcatggaataactatattgccgcaaattgcacttttgttttagcgatcgcattttttttgcaagattgttggcaaggaaaacagcttgctccgtcgaaaaccccgcaccgctatcgcacactattttcaggccatttttaccttccatcggagatggttccgtatgcgactcacaggagaaatcatgaaaataataacctgctttaagctggtgcctgaagaacaggacattgttgtcactccagaatacaccctgaatttcgacaatgccgacgccaaaatcagccagttcgatctcaatgccattgaagctgcaagccagctcgcaacagatgacgatgagatagccgcgctgaccgttggcggcagtttgttgcagaacagcaaagtgcgcaaagacgtgctatcccgcgggccgcacagcctgtatttggtgcaggatgcgcaacttgaacatgcactgcctctcgataccgcaaaagcgctggcggcagcaattgaaaagatcggcttcgatttactgatctttggtgaaggttccggcgacctttatgcccagcaggttggcttgctggtcggagaaattctgcaacttccggtgattaatgcagtgagtgctattcagcgtcagggcaatacactggtgattgaacgcacgcttgaagatgatgttgaagttattgaactctctgttccagccgtgctctgcgtcacctccgatattaacgtgccacgcattcctagcatgaaagccattctcggcgcgggtaaaaaaccggtaaatcagtggcaggcaagtgatattgactggagccagagcgcgccacttgctgaactggtcggcattcgcgtaccgccgcaaacagaacgtaagcacatcattatcgataacgatagcccggaggccattgccgagctggcggaacatctgaagaaagccctgaactgaagcctacggagaagaaacgatgagtcaattaaacagcgtctgggtctttagcgataatcctgaacgttatgctgaactgtttggcggcgctcagcaatggggccaacaggtgtatgccattgtacaaaataccgaccaggcgcaggcagttatgccttatggtccaaaatgtctttatgttcttgcgcaaaacgacgcgctgcaacgcactgaaaattacgccgaaagcattgctgccctgctgaaagataaacaccccgctatgttgctgttggccgcgacgaaacgtggtaaagcgctggcagcacggttaagtgtgcaactgaatgcggcgctggtgaacgatgccacggcggtggatattgtcgatggtcacatttgcgccgaacaccggatgtatggcgggttagcgttcgctcaggaaaagatcaacagcccgctggcgatcattacccttgcacccggtgttcaggaaccgtgcaccagtgatacctctcatcagtgcccgacagaaacggtaccttatgttgctccgcgtcatgaaattctctgtcgcgaacgccgtgcgaaagccgcaagcagcgtggacctgagcaaagcaaaacgtgtggttggcgtcggtcgtggactggcggcgcaggatgacctaaaaatggtccacgaactggcggcggtgctgaatgctgaagtcggctgtagtcgtccaattgccgaaggcgagaactggatggagcgtgaacgttatatcggtgtctccggcgtgttgctgaaatccgatctctacctgacgctggggatctccgggcagatccagcatatggttggcggcaacggcgcaaaagtgattgtcgccatcaataaagataaaaatgcgccaatcttcaactatgccgactacggtctggtgggcgatatctacaaagtcgtccctgccctgattagccagttgagccgctaattcccctttcaaccacatctcccgctgtaaacgcagcgggaagggagcataacgcatgagcgatgacaaatttgatgccattgtggtcggtgcgggcgttgctggtagcgttgccgcactggtcatggcacgagccgggctggatgtcctggtgatagaacgcggcgacagtgccggatgtaaaaacatgaccggcgggcgtctttatgcccacacacttgaagcaatcattccaggctttgcagtaagtgcgccggtagaacgcaaggtcacacgcgagaaaatctccttcttaaccgaagaaagcgccgttaccctcgattttcaccgcgagcagccagatgttccgcaacacgcatcttataccgtattgcgtaatcgtctggacccgtggttgatggaacaagccgagcaggcgggcgcgcagtttatcccaggcgttcgcgtcgacgcgctggttcgtgaaggaaacaaggtcactggcgtgcaggctggggatgatattctcgaagcgaatgtggtgattctggctgatggcgttaacagcatgcttggccgcagcctgggaatggttcccgcttccgatccgcatcattacgctgttggtgttaaagaggttattggcctcacaccagaacagatcaacgatcgctttaatattacgggcgaggaaggtgccgcctggctgtttgccggttccccttctgacggcctgatgggcgggggatttctctataccaacaaggattccatatccttggggctggtttgtggattgggtgatatcgcccatgcgcaaaaaagcgtgccgcaaatgctggaagattttaaacaacaccccgccattcgcccgctgattagcggcggcaaactgcttgaatattccgcgcatatggtgccggaaggcggtctggcaatggtgccgcaactggttaacgagggcgtgatgatcgttggtgacgccgcaggcttctgcctgaatttgggttttacggtccgcggcatggatttagccatcgcaagcgctcaggctgccgccacaacggtgatcgccgccaaagaacgcgcggatttctccgccagcagtctggcgcaatacaaacgtgagctggaacaaagctgcgtcatgcgtgatatgcagcattttcgcaagatcccggcgctgatggaaaacccgcgcctgtttagccaatacccacgaatggtagccgacatcatgaacgagatgttcaccatcgacggcaaaccaaaccagccggtacgaaaaatgatcatgggacatgcgaagaaaattgggctgatcaacttgctgaaagatggcattaagggagcaaccgcgctatgagccagaacgctacggttaacgtcgacatcaaattaggcgtcaataaattccatgttgatgagggccacccgcatatcattctggcggaaaatcccgatatcaatgaattccataaattaatgaaagcctgccctgccggactttataagcaggatgacgcaggaaacattcattttgattccgccggttgtctggagtgcggcacctgtcgggtgctgtgcggtaacactattctcgaacagtggcaatatcccgcaggcaccttcggtattgattttcgctacggctaatcatgcatcccacaggcccgcatctcgggcctgatgttctgtttcgagagtccaacatgaaagtgacattaacgtttaacgaacaacgtcgtgcggcgtatcgtcagcaagggttatggggcgatgctagcctggccgattactggcagcagaccgctcgtgcgatgccagacaaaattgccgtggtcgataatcatggtgcaagctacacctatagcgcgctcgatcacgccgcgagctgtctggcaaactggatgttagcgaagggtattgaaagtggcgatcgcatcgcatttcaactgcctggctggtgtgaatttaccgttatctatcttgcctgcctgaaaatcggtgcagtttccgtgccgctgttgccttcctggcgggaagcagaactggtgtgggtgctcaataagtgtcaggcaaaaatgttctttgcaccgacgttgtttaaacaaacgcgtccggtagatttaatcctgccgctgcaaaatcagcttccacaactacaacaaattgtcggcgtggacaaactggctcccgccacctcttccctcagtttaagtcagattatcgccgacaataccagtctgaccacggcgataacgacccacggcgatgaattagctgcggtgctgtttacctccggaaccgagggtctgccaaagggcgtgatgctaacgcataacaatattctcgccagtgagcgggcttattgcgcgcgactgaatctgacctggcaggatgtctttatgatgcctgcgccacttggtcacgcaacgggctttctgcatggcgtaacggcaccattcttaattggcgctcgcagcgtgttgttagatattttcactcctgatgcgtgtctcgcgctgcttgagcagcagcgttgcacctgtatgctcggcgcaacgccgtttgtctatgatcttttgaatgtactagagaaacaacccgcggaccttagtgcgctgcgtttctttctttgcggcggaaccacaatccccaaaaaagtggcgcgtgaatgccagcagcgcggcattaaattattaagtgtttatggttccacagaaagtagcccgcatgcggtggtgaatctcgatgatcctttgagccgctttatgcacaccgatggttacgctgccgcaggtgtagagattaaagtggtcgatgacgcacgcaagaccttaccgccaggttgcgaaggtgaagaagccagccgtggcccaatgtgtttatggggtattttgatgaacctgaattaaccgcccgtgccctggatgaagaaggctggtattacagcggcgatctctgccgtatggatgaggctggctatataaaaattaccggacgcaaaaaagatattattgtccgcggcggcgaaaatattagcagccgtgaagtggaagatattttattgcagcatcctaaaattcacgatgcctgtgtggttgcaatgtccgatgaacgtttaggtgaacgaagttgcgcttatgtcgtgctgaaagcgccgcatcatagtttaagcctggaagaggtagtggctttttttagccgtaaacgggtcgcaaaatataaatatcctgaacatatcgtggtaatcgaaaaactaccgcgaactaccagtggtaaaatacaaaagtttttgttaagaaaagatattatgcggcgtttaacgcaggatgtctgtgaagagattgaataagtttcatcttcggggatcacataaccccggcgactaaacgccgccggggatttattttatttcttcagttcagccaggcttaaccaggtttgcaccacggtgtccgggttcagagacaggctatcgatcccctcttccatcaaccatgcggcaaagtcttcgtggtcggacggaccctgaccgcaaatcccgacatatttgccctgtttcttcgcggcacggatagccatgctcagcagtgctttcaccgcatcgttgcgctcatcgaacaattcagacaccacgccggagtcacggtccagaccgagcgccagctgcgtcatatcgttactgccaatactgaagccgtcgaaatattcgaggaactgctcggccagcaaggcgttggacgggatttcacacatcatgatgattttcagcccgttctcgccacgtttcagcccctgacgcgccagttcttcaaccaccgctttcgcctgatctacggtacgcacgaacgggatcatgatctcaacgttggtcagtcccatgtcgttgcgcacacgtttcactgcttcacactccagcgcgaaacagtcgcggaagctgtcggaaacatagcggcccgcgccacggaagccgagcatcgggttctcttcatctggctcgtaacgctcaccaccgaccaggttggcatattcgttgcttttaaaatcagagagacggacaatgacgcgcttcggataaaacgcggcacccagcgtcgcgatcccttcagtcagacgaccaacgtaaaattcacgcggagaatcaaaacctttcatcatctcgcggatttcgttttgcaactgcggttcctgatcgtcaaactcaagcagtgcgcgtgggtggacgccaatcatacggttgatgataaattccagacgcgcaaggcccacgccttcgttcggtaggcaggcgaagtcgaaagcacggtccgggttaccgacgttcatcatcactttcaacggcagatccggcatcgtttctacgctggagcttttcacgctaaattccagcaactccgcatagacgtaaccggtatcaccttcggcacaagaaacagtgacgttctcaccgtctttcatccgttctgttgcatctccacagcccactaccgccggaatgcccagttcacgagcgatgatcgccgcgtgacaggtacgaccgccacggttggtgacgatggcagatgctttcttcatgatcggttcccagtccgggtcggtcatgtcagtaaccagcacgtcgccaggttcgatgcggttcatttcgctgatgtcatggatgactttcaccggacccgcaccgatgcgatgaccgatagcacggccttcggcgataatcttaccctgactatgcagcgtataacgctccatgacctgaccgcgactgcgcacggtttccggacgcgcctgcacaatgaacagtttaccggtgtggccatctttcgcccactcaatatccatcgggcgaccgtagtgtttctcaatttgtacggcctgttttgccagttcctgcacttcttcgttggtcaggctgaagatgtcacgctgttcctgcggtacgtcttcgattttaacctgcttgccgtgctcctgggtcggcgcgtaaaccatgcggatttttttgctccccatggtgcggcgcacgatagccgggcgattcgccgccagtgtcggtttatgcacgtaaaactcatccgggttaaccgcaccctgcacgaccatctcaccaaggccccatgcggaagtgataaacaccacctggtcaaagccggattcggtatcaatggagaacatcacgccagaacttgcgaggtcagagcgcaccatccgttgaacaccggcggagagcgccacaccacggtgatcgtaaccctggtgcacacgataagagatggcgcgatcgttaaacagagaagcaaatacatgtttcactgccacgagaacggcgtcaaaaccctgaacgttgaggaaggtttcctgctgaccggcaaaagaagcgtccggcatatcttctgcggtggcggaggagcgcaccgcaaaagaggcgttttcgtcatcggcggaaagctgtgcataggcttcgcggatggcgttttccagctcaggctggaagggagtgtcgataatccactggcggatttgcgcgcccgctttcgcaagctgagtaacatcgtcaatatccgttttatccagcagttcataaatgcgctggtttacgccgctttggtccagaaactggttaaacgcgtcggcggttgtggcgaaaccattcggaacggaaacacccattccggaaagattagtaatcatttcacccagggaggcatttttgcccccaaccctgtctacatcattcatgccgagttggttataccaaagcaccagcggactgctgccattgttggacatcgaacaatccttttgtgataaatgaacggtttgagaaacacatttctgcgcatttatctttgcatatttaaccggatgaaaaaaacggtgaatcgttcaagcaaatatatttttttactttttaagactgatcccagcgttgcgcaaatctgctctcttcgacaatttccacataaaccatcggtataaacgaaaccataaaaatgaaatgctgttttcataaaaaataaaattgaaggttcattttataaaccagacataacgttctacgcttctgtgcgtttttaatttatgctttcatagaattatgtctgcatcacgggaagaacaaaatggataatgctgttgatcgccacgttttttatatttctgatggtacggcaataactgcggaggtattaggacacgcagtaatgagtcaatttcccgtcactatcagcagcatcacgctgccgtttgtcgaaaatgagagccgtgcacgggcagtgaaggatcagattgacgcaatttatcaccagacaggcgtgcgcccgctggtcttctactccatcgtgttgccggagattcgcgccatcatcttgcaaagtgaaggcttttgccaggatatcgttcaggcgctggttgccccgctacaacaagagatgaaactggatccaacgccgattgctcatcgtacccatggccttaaccctaataatctcaataaatatgatgcgcgcattgcggcgattgattacaccctcgcccacgatgacggcattagcttgcgcaatctggaccaggctcaggtgatcctgctcggtgtttctcgctgtggtaaaacccccaccagtctgtatctggcaatgcagtttggtatccgcgcggcaaactacccctttattgccgacgatatggataatctggtgctacccgcgagcctcaaaccgcttcagcataaattgttcggcctgactatcgacccggaacgtctggcggcgattcgcgaggaacgtcgggagaacagtcgctatgccagccttcgtcagtgcaggatggaagtcgcggaagtggaagccttgtaccgtaaaaatcagatcccgtggattaacagtaccaattatagcgtagaagagattgccaccaagatcctcgatatcatgggccttagtcgccgaatgtactaaagaactagtgcattagcttatttttttgttatcatgctaaccacccggcgaggtgtgacacacctcgcacttgaaatcagcagcgattggtttatcgtgatgcgcatcacttcccggcagtcctgccgtagaagcaacaaatttctgagacttgtaatgaacagaactgacgaactccgtactgcgcgtattgagagcctggtaacgcccgccgaactcgcgctacggtatcccgtaacgcctggcgtcgccacccatgtcaccgactcccgccgcagaattgaaaaaatactgaatggtgaagataagcgactgttggtcattattggcccctgcagcatccacgatctcaccgctgcaatggagtacgccacccgtctgcagagcctgcgcaaccagtaccagagtcggctggaaatcgtaatgcgcacctattttgaaaaaccacgaactgttgtcggctggaaaggactaatctccgatccagatttaaacggcagctatcgggtaaatcacggtctggagctggcgcgcaaattacttttacaggtaaatgagctgggcgtcccaaccgcgaccgagttcctcgatatggtgaccggtcagtttattgctgatttaatcagttggggcgcgattggcgcacgtactaccgaaagtcagatccaccgcgaaatggctagcgcactctcctgtccggtaggtttttaaaatggtaccgatggcaatacgcggattgctgtggatgctatccgcgcagcccgcgccagccatatgttcctcagcccagacaaaaatggtcagatgaccatctatcagaccagcggcaacccgtatggccacattattatgcgtggcggcaaaaaaccgaattatcatgccgatgatatcgccgcagcctgcgatacgctgcacgagtttgatttacctgaacatctggtggtggatttcagccacggtaactgccagaagcagcaccgtcgccagttagaagtttgtgaggatatttgtcagcaaatccgcaatggctctacggcgattgctggaattatggcggaaagtttcctgcgcgaaggaacgcaaaaaatcgtcggcagtcagccgctcacttacggtcaatccattaccgacccgtgtctgggctgggaggataccgaacgcctggtcgaaaaactcgcctctgcggtagatacccgcttctgaatgcgtgcccattcctgacggaatgggcatttctgcgcaacttgttgtcttctcaacaaattactgcttgctctggtcagccataatattgataataagaatcattgttatatcaattattattaatttttatgcgttatacggatagcagaaaactcacgcctgaaacggatgccaatcacaagaccgcttccccgcagcctattcggcgaatttccagccagacactgttaggtccggatggcaaactgattatcgatcatgacgggcaagaatatctgctccgtaaaactcaggctggcaagctgctgttgaccaagtaacctttaactgctgcagctgacttccagccgtttaccccagtcaggtggacgactgacatagtcatcatctctgtcgctgaaaggatttcgcaacgcctcatgcaggcggtgcaattccgtcatatcacccttttctgccgcttcaatcgcccgttgcgccaaccagttgcgcaataccagagcggggttaacgctttgcatcagttgctgacgctcactatcgctaacctcgtcttgttgcaaacgcccccgataacgggcaaaccagtcatcaaatgccgcacgatcaataaactcatcacgtagcggactcgccgcgctgtgctgctcggtcagactcagcatgcggaatgtgcgggtataatcgctgcgctctcgcgccatcagactgaataattcattcagtagcgcgttatcctctttttgctccgtcatgaagcccagtttctgccgcatccgttctccataatgcgtcaacaaaacctgctgatagctgtccagggcctcattcagggcatctacggcaacaaatgggctcaatgtctgcgccagacgctgtaaattccacaacgcgacggcaggttgattatcaaagctgtaacgcccttgatgatcgctgtgattacaaataaaaccgggttcgtaatcatcaagaaaaccaaacggcccgtaatcaagcgtcagccccagcaggctcatgttgtcggtattcatcaccccatgagcaaagccgaccgtctgccattgggcaattaagctcgcggtacgtgcgacaacatcgctaaaccagagacggtatttgtcctcatcatctgcaagatgactccagtaatgacgaatagcaaagtcagctaactgacgaaccttttcgctctcgcggcggtagtaaaaatgttcgaaatgaccaaagcgcagatgacttggtgccacacgcatcagcatcgcgcctggctccgccgtttcccgatacactgggctatcgctggtgacgatacttaacgcgcgggtcgtcggaatgcccagataatgcatcgcctcactggcgagactttctcgtatcgtgctacgtaaaaccgcccgtccatcacccattcggctataaggcgtcaggccagcacctttcagatgccagtccattgtagtgccatcagcaagcagttgttcgccgagtaaaatgccgcgcccatcacccagttggcccgcccagacgccgaactgatgaccactgtaaacctgcgccagtggactcataccaggcagtagggcttcgccgccccagacacctgcgccatttttaaacaggctgcttggaatactcagcgtgttagccagttcggtattatgccaaatcagccgggcattatttaaaggcgtaggggaaagtgctgtataggtttctggcaattcatcgcgccagcgggtaacaaaagacagggtcatagatcctcctgtttgatagtgtagacggttactctcgtcttaaacaccagcaaacagaagggttatcgctgaaccaacgtcgttatctgatttatgggaacggcaggccacaggcatccctggagagcatggaaatcgaagggggtaatctgtgccaatatttctgccgtatcaatgcctcccgcaatgatgcaattgcaacaaggggaaatttgcgcctggatcgcacgaataaacggttcgaaggagcggtgcgtgatttgttgctgaataaaacttttatccagcatgacgcgggtgaaaagaccatcaaaaaccgctttcattgtgctattgcctgctcccaaattacctaacacaaggggatacacttggcttaaggataaaagaccgcgattatcttttccttcattgagatgcgggtaattctcattaatcaacagttcaataaacggatattttaatagttcgcctgcgtaattatccctctctaataataatgtagccacttgtggcgttaaattaagccaggcaaagagtttatgttgaataaaaaaatgttggcaactttttagtaattccaactgctcactaaataattgccaatgttgctcctcggtaagttgcgctataacccgactcgtcgggatacgaaccgtaccatcttcactggagaaatgggtaattaactcaacgccgacaaggacttgctggttgtctcttatcggcaggaaatagcaatcagaatgataaagattctccaaaaaaatcttcatggtaaccgtccctctcgaaggatgtttttcagtatccggctaaaagggatgaggccataagacataacaattacagaaggagtaactttcatttgttccatgttaaccactttttcaggggtcctttttttagattatcctgattataaacgaataatccatttacggaatttttgtctgcaaaatactactgtattcaggagtaaatggacggcgatgtatcatcgccgtccatttttcgacatattagattcgtctcgcctgccagaaatttttctgccaatagacattatcaagactggaacgcatcactcccttgctggtagaggcgtggataaattggttgttggtatcgtaaatacctacatgcaaaccattttgtccggaccccgttttgaaaaagaccaggtcacctggcagcaactcgtctttatcaatttgcgtgccaatagaggcttgttgtttggtttcacggggcagctgcaaatcgaaacgatcgcgcatcgtcacaaccacaaatccgctacagtccacaccgcgccgcgtcatgccaccataacgatacggcgtgccatgccagctttgtagctggtcgttcaaaccggcaataacggtaatgctatcagaaagtctggcatttggcggcggtgctttatggtggctacacccggccagaagcagtgctgtgatcaaaataaggcagaaacgcattccgtacggttcctctgttttttattcttgcattaatttagcgtcgtaattacccgattttcaagatactaatgaaatcagatggtgctaatcagcattctgtgaccttcgatatccagacggcgaaaattcatcccataggcctgcgccagatttggcggcgtgagcacctcttccctgcgtccactggccagcatttttccaccttttagcaaccacgcccgatgcgcatgacgcaatgtgtggttgagatcgtgactgctcatcacaatcgccagtccttgctgacacagcgcgctcagaattttgtctaacgcactttgttgcgcaacatcaagactgttcatcggctcatcaagaagcagcaattggcctgcgggattggcttgtggtgtgatttgcaacaccaccgcagcaagacgtacgcgttgccattcaccgccggaaagttgattggtgctacgtccgagtttgtcatcaagagccagcgcccctgcgacatcattcagtagttcggtacgcgttttatcgtgctgatgcagtgtcaggtagtgccagaccggcgttgcaaacggcggcgtctgctgttgactaagataggcgcgatgcagcgcgagttttgttgcggaccatgcttccagtggttgccccgcgaactgaatgcttcccttaccgctggtcattccggccattcgcgccagtaaggtactcttacccgcgccattcggccccaccaggtgcaggatctccccagcccgaacctcgccagaaagcggccccaggcgggtagattccgcaacatcttgtaactgcatcacaatagacattattttgccaacgccagtttaatgctttccatcacaatgggatcttccggcgtcatatccggggaaaaacgctggatgacttttccgtccctgccaaccaggaatttttcaaaattccataaaatatcatccgggtacagcggtgcacggcctttgctgaccatacgggcatagaatccgctctcttccggcgcgactgcggtcggcgctgcggcaatcaatttttgatacagcggatggcgtccttcgccattaacttcaatcttactgaacatcgggaacgtcaccccccatgtggtggtacagtaagttttaatctcttcatcgctgcccggttcttgttccagaaactggttgcacgggaatcccagcaccataaaacctcgatcgacccaggctttctgaatattctccaactgctcatattgcggcgttaagccacacttactggcgacattgacaatcaacagcacattaccggcgaacttctccagcgtggtcacttcaccgtcgatatctttcactacggtcgtcagaatggaatcttgcatcgtttctcctgggtgtggtcagtaaaaatcttagcttttaatcatagaccgtctttttgcggttaacgtcctgcttttaacaataaccagataaacaccggcgcacctaacgttgcggtgaccacgccaataggcagctctgcggcagctaatgccaggcgcgctacaatatcggccagcagcaatgcgctcgcccctgccagcgcgcagccgggaagtaatacgcgatgatcggttaaaccacacaaccggagaatatgggggatcaccagaccaataaagccgatagcacccgccagcgccacactgacgccaaccatccagccggtcgctgccaccagcacattgcgccagaaccacaggggtaaacccagttgccgcgcgctgatctcgccaagtgctaacatattcatcggcctggactgacaacagatccacaacaacacggggatcaatgccagcatcagccagctttgccgccagtctacgccgccaaaaccgcccatcatccagtacatcagctgacgcaaatcaacactggtggaaaagtagatagcccacgtcattagtgcgctacagataatccctaatgcaacgccagccagcaataaccgactggtgctaagatgacgacgggcgaaacgtaagagtattaaagtgatgataagcgcgccagcaatcgcacacagccctagcgcccagttggggagttgcccttgcccaagcaataccgcggcgataagccccacgcctgcgccgttagagacgccaagtagtccaggttctgccagaggattttcaaacaacgcctgcattacagcgccggatatagccagcgccgcaccaaccagcaatacagccagcgtacgtggcaggcgaatttgccagacgaacagttcgccacgaggagtaaaccagtcacctgggctgatccattgttcaccggcgcaaaggcttaagagaagcgccagcagcatcaaaacactcaggcataataaccagcgaatattttgtcgctgttgttggcgggcaagtgtcagcatggtatccgttctgctgaagtgtcatggcgttgattttacggtgactcttcgacagtgaaaagaaaaaaggccgcagagcggcctttttagttagatcagattactcgtctttggggctagcgttttcgacccggctttttaacttctgcccgggtctgaaggtcaccacgcgccgtgctgtaatgggaatatcctcgcccgttttcgggttacgtcccgggcgttgattcttatcacgcagatcgaagttaccaaaaccagagagtttcacctgttcgccgttttccagagcgcgacggatctcttcgaaaaacagttcaaccagttctttggcatcccgcttgctaagcccaagcttatcaaacagatattcactcatttcagcttttgtaagcgccataggttcaatccctcaaacttgcctggaatcgctcttttaatgcctctacacatttggcgacggtagcggcaatctcctcttcttcgagtgtacggctggtatcttgcaggatcaggcttatggcgaggctcttatacccctccgcaacacccttaccgcggtacacgtcaaataagtttacgccaactacctgatttacgccaactttcttacattcggataaaatatccgctgcgggaacgttttctgcgaccaccaccgcgatgtcacgacggttcgccgggaagcgagaaatctcgcgcgcctgaggcaccacgcggtctgcgagcttgttccactccagttcgaacaccagagtgcgaccgttaagatccagtttacgttccagttcaggatgaacaaccccaacaaaaccaatacgttcacctttcagataaatcgctgcggattgccccggatgcagtgccggattcgcttctgcacggaactcaacctcattcagtttaccggtcaggtcgagaacggattcaagatcgcctttcaaatcatagaaatcaacggtctcttttgccaggttccagtgctcttcgtaacggttaccgcaaatcacaccggctaacatcagatcctgacgaatgcccaacggtgcctgagtatctggtacgaaacgcagaccgctttcgaaaatgcgcacacggttctgctgacggttctggttgtacaccacggttgccagcaggccagtccacagagaaagacgcattgcactcatttcaacagagatcgggcttggcagcagtaaggcttcaacgcctggatggatcatctgctgcactttcggatcaacgaagctgtaggtgatcacttcctgatagcctttgtcgttgagcagcgttttcacgcgcttgaggctcaggtcagcttcacggtgagtacccataatcaggcttgcctgtaccggctcatccgggatgttgttgtagccgtaaacacgcgcgacttcttcaaccagatcttcttcaatctccatatcgaaacgccagctcggcgcaactgcctgccattcgtctttgccttcggtcacttcgcagccgagacgacgcagaatgtcagttacctgctcatccgcaatatgatggccgatcaggcgatccagtttgctacgacgtagagtgatggttgcacgcttcggcagcgttgcttcgttggtgatatcaattaccgggccagcctcaccaccgcagatgtcgatcagcagacgggtcgcacgttccatcgctttgtgctgcagtgccggatcaacgccacgctcataacggtgagacgcatcggtatgcaggccatgacgacgagcacgaccggtgatagacagcgggctaaagaacgcgcattccagcagcacgttttgtgtttcgtcattcacgccagagtgttcgccaccgaagatgccgcccatcgccagcgccttgttgtggtcggcgatgaccagagtgtcagcattcagcttcgcttcagtaccgtcgagcagcaccagcgtttcgccctctttcgccatccgcaccacaatgccgccttcaatgcgatctttatcgaaagcgtgcatcggctggcccagttcgagcagcacatagttggtgacgtcaacaactgcatcgatagaacggatcccgcaacgacgcagtttttctttcatccacagcggagttggcgctttaacgttaatgccttttaccacacggccaagataacgcgggcaggcttccggcgcttcgactgtaatcggcagcgtgtcgtcgatggtcgcaccaaccggaacgatttccggttgaaccagcggcagctggttcagcacggcaacgtcacgcgcaacaccaatgatgcctaagcagtcggcacggtttggcgtcacgctgatttcgatggtgttgtcatcaagtttcaggtattcacggatatcggtgccaatcggcgcatccgcaggcagttcgataatgccgctgtgatcgtcagaaatgcccagttcagagaaggagcacagcatcccttcagacggttcgccacgcagtttcgccgctttaattttgaaatcacccggcagaacagcaccaatggtcgctaccgctacacgcaggccctgacggcagtttggcgcaccgcagacgatgtccagcaggcgatcgccgccgacattcacttttgtcacacgcagtttgtcagcgttcggatgctgcgcacactcaaccacttcaccaacgaccacgccgtggaagctgccggcaaccggttctacaccgtcaacttccaggcccgccatagtgatttgatttgccagcgcatcgctatcaatcgccgggttcacccattcgcgtaaccacagttcactgaatttcataatctattcctgccttatttaaactgtttgaggaaacgcagatcgttttcgaagaaactacgcaggtcggtgacgccgtaacgcaacatagtcagacgctccatccccatcccgaaggcgaaaccagagtaaacttccgggtcgatgccaacgttacgcaacacgttcggatgcaccatcccgcagcccagcacttccagccatttaccgtttttacccatgacgtccacttctgcagaaggttcggtaaacgggaagtaggaaggacggaagcgaatctgcaaatcttcctcaaagaagttacgcaggaagtcgtgcagcgtgcctttcaggttggtaaagctgatgttggtatcaacaatcagaccttccatctgatggaacatcggcgtgtgagtctggtcgtagtcgttacgataaacacggccaggcgcgatgatacgaatcggtggctgctgggctttcatggtgcggatctgtacgccagaggtctgggtacgcagcaggcgggtagtgtcaaaccagaaagtgtcgtggtcagcgcgcgccgggtggtgaccaggaatgttcagagcatcgaagttatgataatcgtcttcgatttccggcccggttgccacggtaaagccaagctcaccgaagaaactttcgatacggtcgatggtacgggtaaccggatgcagaccgccgttttcaatgcgacgacctggcagagagacatcaatcgtttccgccgccagacgcgcattcagtgcagcgctttccagttccgctttacgcgcattcagcgcctgctgaacctgctctttcgcttcgttgataaccgcaccagctgccggacgctcttctggcggcagctcacgcagggtcgtcatctgaagggttaagtgcccttttttacccaaatattcgacgcgcacattatctaacgcggcaacatcactcgcctggctaatggccgccttcgcactggcaaccagttctgcgagatgactcatggttttcctcattgtgtcagtggtgacactggttcgttggacttagagcctatcccatcaggctattttacttgccattttggtcccgggctgtgctcgaaattctcacgtacttaaatacgctccggtttctccgcgctggccgtgtccagtctggctgcgacaattacacctgatgagacaggctttttatttttcaaaacgcgcatacaaaaaaagcctccactgggaggctttcaggcgctgttttccgtttctcttctcacgcgctagcctcctggattcaggtgctaaagtaaaaaaagaagcggaaaatagcagcattcattgcttgcgttaccttttggtactcttcaaaagacctttattgaaaaggctacggcgataaaagtcaatgttttgatggcgttgaaacgaaaagagggagactagctccctctttcaactggcttatgccagagctgctttcgctttttcaaccagagcggtgaacgctactttgtcgaatactgcgatatcagccaggatcttacggtcgatttcaacagaggcttttttcaggccattgatgaatttgctgtaagaaataccgttctgacgtgctgctgcgttgatacgcgcaatccacagttgacggaactgacgcttacgttgacgacggtcacggtaagcatactgaccagctttgataacagcctggaaggcaacgcggtatacgcgagaacgcgcaccgtagtagcctttagcttgtttcaaaattttcttgtgacgtgcacgtgcaataacaccacgttttacgcgagccatatgtgctctcctgtatctatattctaattaaaaagttaaaaacgttaacggcttatgcgtacggcaggcacgcgattaccaggcccagatcgcctttggaaaccatggctttcggacgcaggtgacgtttacgtttggtcgcttttttggtcagaatgtgacgcaggttagcgtgcttgtgcttaaaaccacctttaccggtttttttgaagcgcttagcagcaccgcgtacggtcttaatttttggcattttaataacttccacttcgcattgttaataaacgaaacaaaggcgaacaaagcctgtgaagcccgaaggctccacagacagtgctacttgaaggccttactgtttcttcttaggagcgagcaccatgatcatctggcggccttcgatcttcgttgggaaggattcgaccactgccagttcttgcaaatcgtctttcacgcgattaagcacttccataccgatttgctggtgcgccatctcacgaccgcggaaacgcagcgtgattttggctttatcaccctcttcgagaaagcgaatcaggctgcggagttttacctgatagtcgccttcatctgtaccaggacggaatttaatttccttaacctggataactttttgctttttcttctgttccttagaagacttgctcttttcatagaggaatttgccgtaatccattatacgacaaaccggcggctcggcgttagggctgatctcgactaagtctactccggcttcttctgctttctccagagcttctctcagactcacaataccaagctgctcgccttccagacctgttaagcgaacttcctgggcgcgaatttcgccattgatacggttagggcgcgccgtttgaactcgttttccgcctttaataccttattcctccaattgtttaagactgcggctgcgaatctcttgttgcagcttctcgatcacttcatttacgtccatgcttcccaggtctttaccacggcgggtgcgaacggtaactttgccactttccacctctttatcaccacagaccagcatatatgggacgcgacgcaaagtgtgctcgcggattttaaagccaatcttctcatttctcaagtctgctttaacacgaatgcccgcattacttagtttttgcgtcaattcgttaacgtattcagactgactatcggtaatattcatgataacaacctgaaccggcgcaagccaggtcgggaagaaaccagcgaactcttcggtcaggataccgatgaaacgttccatgctccccagaattgcgcggtgaatcattaccggtactttacgttcattgtcttcgcctacataagaagcgctcagacgagacggcaaagagaagtccagctgtactgtaccgcactgccatgcacgatcgaggcagtcatacagggtaaattcaattttcggaccgtagaaagcgccttcacccagttgatattcaaacgggatgttgttttcttccagcgcaaccgccaggtccgcctcagcacgatcccacatttcgtcgctgccaatacgtttttcaggacgagtggagagtttgacgacgatcttctcgaagccaaaagtgctgtacatatcatagactaaacggatacatccgttaacttcatcgcgaatttgttcttcagtacagaagatatgcgcgtcatcctgggtaaatccacgcacgcgcatcaggccatgcaggctaccactcggctcgttacggtggcagctaccaaactcggccatacgcagcggcagatcgcgataagacttcagcccctggttgaaaatttgtacgtgacccgggcagttcatcggcttaatgcagtattcacggttctcagaagatgtggtgaacattgcatctttgtagttgtcccagtgaccggttttttcccacaggacacggtccatcatgaacggacctttaacttcctgatactggtactctttcagtttagaacgaacaaacacttccagttcacggaagatggtccagccgtcgttgtgccagaataccatacccggcgcttcttcctgcatatggtacaggtcgagctgtttaccgattttacggtggtcgcgtttcgcggcttcttccaggcgctgcaggtaagcgttaagtgcttttttgtctgcccacgccgtaccgtaaatacgttgcaacattttgttgttgctgtcgccacgccagtaagcccctgccgttttcattagtttgaaatgatggcagaaacgcatgttcggtacgtgcggaccgcggcacatatcgacatattcttcatggaagtacagacctggcttgtcatcatgggcgatgttttcgtcaagaatggagactttgtagctctccccacggttggcgaaagtttcacgcgcttcgtgccagctgactttcttcttaatgacgtcgtagtttttctcagcaagctcatgcatccgcttctcgagtgcttcgacatcttcctgggttaacgtgcggtcaagatcaacgtcgtaataaaaaccgttgtcaataaccgggccgattgccattttggtatgcggccaaagttgtttaatcgcgtgccctaacaggtgcgcacaggagtgacgaatgatctccagaccttcttcgtctttggcggtaatgatgctcagttgtgcgtcgttttcaatcagatcgcaagcatcaaccagttcgccattaacgcgccctgcgatacaggctttcgccagacctggaccaatgtccagcgcaacatccatggggcttacagcgtgatcgtaatggcgttggctgccatcaggaagagttataacaggcattttatatccttatttgcagtggtgacccacacgaaagatcacatacaaagaaaaatttgtttattaacagttcattgcgaaaccatctagccaacaaatgctaaattggttcgcaatcaggtacacaaatgaaagacattaacctctcaccttccacccggttgagcgatgttaacactaaaaaaagggagattgtacctttccgtttcacattgattcgattcgcaattcgtttgtagtgagtacaccagcaaaacgcttaaagaacaactgataacatcacggtgcgtctgaaaggtttactgcgagcggatttacagcagcataaactgaatccagcaaagttcgttgcgtgatttggcggtagtattttaaacgctcatgagattaatgacgaagtggtcatatcacaatgataaaagtgacacaattcttataacaatttttcgtgcacatttcgttctggcgataataattaatcatcatcctcaaaacctccagatatatataaggcgaacagattatgagtcaaaacgatatcattatcagaactcattataagtctcctcatagattgcacatcgatagcgacataccaacaccttcatcagagcctattaatcaatttgcgcgccagctcatcaccctacttgatacctctgacttaagttcgatgctgtcatactgtgttactcaggaatttaccgcaaactgtcgaaaaatatcacaaaattgttattccactgccctttttaccattaactttgccacttcacccatccatacagaaaatatactcattacattacactataaaaaagaaatcatttccttattactggaaaccacgcctattaaagctaaccatttgcgaagcatactggattatattgaacaggaacagttaactgctgaagatcgtaaccattgtatgaaactgtctaaaaaaatccatagagaaaaaaactatacacccaacagtaaatctcaatggtagtgcatgttttttgcaatctccttctgacgctattttttgtcgccatctgtcattgcaatacgcccttgattcattgagaaatggaaaaggcaaagtcaacctgattaaacattactcctccgttgaatccatacagcagcatgtccccttagtccgggacgcggagttcagagcattacttcgccatcctcctgcagggagtcgcgttatcgcgagtaaggattttggcttcgctttagatattttcttttgtcgaatgatggcaaacaatgtcagtcatatgtccgcgattttatatatagacaatcatactttgtcagtaaggctacgaataaagcagtcagtgtatggacaattaaattatgttgtgtccgtttacgacccgaacgataccaacgttgccgtcagagacacccacaggacagcacggggctttctttcgcttgataagttcatcagttcaggtcccgatgctcagacctgggctgatagatatgttcgcaactgtgcaattgctattctgcccctattacctgtgggagttccaggggctattttcgcgggtattgcatcacgaatgccatttgcccctatacatccatcggcaatgttgttaataatggctacaggccagtctcaacagcttattacattattcaaacagttgcccatactccctgaaaaagaaatcattgaaataataactgcgcagaatagcgttggtacacctgctttatttttggctatgatgaacggacatactgacaacgtgaaaatatttatgcaagaaattcagtcactggtagataatcacatcattcatgaagataatctggttaaattactgcaaactaaaagtgctaacgaaacacctggactttatatctccatgttgtatggattcgatgaaataatcgatatctttctgaatgcattaaccactccaatagcacaagagcttttaaacaaaaaactggtgatgagtattttagccatgaaaatacatgatggtgagccaggattatacgccgcaatggaaaataatcaccctttgtgtgtcacacggttcctctctaaaattaatggcatcgcctttaaatacaagttgagcaaagctaacatcatggatttattaaaaggagctacagcacagggaacccctgcattatacatcgccatgagcaagggtaatgaagacgtcgtgttatcttatatatcgacgctgggtgcttttgcaaaaaaacattcttttagtcaacatcagttatttacactattggccgctaaaaatcatgacaacatgtcagctgttcatatagccattcatcataagcattataaaactgtagaaacatattatgctgctattaatgcaatcagccaaagcctgagttttagtgctgatgaaataaagacgtatttataaccagctatttacgatatatatcgatacataattttatttttttcataaaacgcagaaacagtgaccatgtgcacaacgccacccgacggctgtaataacaaaaaatcccttgatgcctgtcccttttgttacactccgttatcacgcacaagagatatgcaggacactggtatgccgactaaacgctttgataaaaaacactggaagatggtggtggtgctactggcaatctgtggcgctatgttgttgctacgttgggcagcaatgatttggggctgagcagtgacaaacgaagacagccagaccgcataacacggtccggcagataattttacatgctgtagcccaggcttaaggttgtccgacggtcggtatgttccggtgcagactctggaggttcagagttccatgtgacgttgtaagccaccttcagtccaaaatgttcattaatagcaacatttaatgcgctttcggagttcagcgttgtgtcttccgcgccaaagacgctaacaccctgcgtaaatttagcgttgtcagtcaactgccatgcataagccccggaggcatagcccagcggctgggtttcactggcattgtcggtatatttgtcgtaacgcacacctggaccgaattcaaagcggaaactgtgtaccgggccattcaaaaactgacgaccataacccgcggtcaacacatcgcgctctcgatagccgttataacggtctgtcagccagcttgcctgaccaaataaatagtcataatcagttaaattaaaacggctacgcccgcccgccgcatatttttcactagaacgctcatcattagaagaagtattactggcgttcccccacaggctccaggcagtggtgtgtccataccaggtcatggtggtgtcagccgtaagactggagcttttcgtattgccactttgtgcaagatatcctgcgttcagattaccttcgaaaggttttttagcgctggcaggatcatccatgacagtaaaaacggaatcatcggcagctgcattcagactcgcaaacatgccccccgccaacataacgatggcaggaactgtcttcaaaagcttcatttatcaagagtccgtacaacaaaaaaagagaccatcgcggtcccggaaactttcttaaggatcaaagattagcgtccctggaaaggtaacgaattataaaaaggcgcgaataacttagcaatgtattcttatttcattttttgaataagcatgtggcgaaaacagatttttatttatatatatttatctgcaaaattttaaataaagctccaataaatcatattgttaatttcttcactttccgctgattcggtgccagactgaaatcagcctataggaggaaatgatggtacgtatctatacgttgacacttgcgccctctctcgatagcgcaacaattaccccgcaaatttatcccgaaggaaaactgcgctgtaccgcaccggtgttcgaacccgggggcggcggcatcaacgtcgcccgcgccattgcccatcttggaggcagtgccacagcgatcttcccggcgggtggcgcgaccggcgaacacctggttagtctgttggcggatgaaaatgtccccgtcgctactgtagaagccaaagactggacccggcagaatttacacgtacatgtggaagcaagcggtgagcagtatcgttttgttatgccaggcgcggcattaaatgaagatgagtttcgccagcttgaagagcaagttctggaaattgaatccggggccatcctggtcataagcggaagcctgccgccaggtgtgaagctggaaaaattaacccaactgatttccgctgcgcaaaaacaagggatccgctgcatcgtcgacagttctggcgaagcgttaagtgcagcactggcaattggtaacatcgagttggttaagcctaaccaaaaagaactcagtgcgctggtgaatcgcgaactcacccagccggacgatgtccgcaaagccgcgcaggaaatcgttaatagcggcaaggccaaacgggttgtcgtttccctgggtccacaaggagcgctgggtgttgatagtgaaaactgtattcaggtggtgccaccaccggtgaaaagccagagtaccgttggcgctggtgacagcatggtcggcgcgatgacactgaaactggcagaaaatgcctctcttgaagagatggttcgttttggcgtagctgcggggagtgcagccacactcaatcagggaacacgtctgtgctcccatgacgatacgcaaaaaatttacgcttacctttcccgctaacaaaaacattcccccagcattgggggaatcatcaccaacctgtcggcaacgcgtttctccgactatgctcaaaagtcatgtgataacaaaggggtgaactatggccagtggcgatcttgtccgttatgtcataaccgtcatgttgcatgaggatacattgactgaaattaacgagttgaataattacctgactcgcgacggttttttgctcactatgacggatgatgagggaaatatccatgagctgggaactaacacttttggacttatcagtacccaaagtgaagaagaaattagagaactggttagcgggcttacccaaagtgcaaccggcaaagatcctgaaatcaccatcacgacctgggaggaatggaatagcaacagaaaataaatggtttttgggcaataatcagtctgtggtgtgcgttagctcgtgtttttacaccgcattcttgcgctaaccttatgatctggcagacaacatgggagagacatcatgtggcaggcaatcagtcgtcttttgagcgagcagttaggtgaaggcgaaatcgaactgcgtaatgaactgcctggcggagaagtccatgccgcatggcatttgcgctatgcaggacatgattttttcgtcaaatgtgatgaaagggaactgcttcccggttttaccgccgaagccgaccaactggagttactgagccgtagtaaaaccgtcaccgtgcctaaggtttgggcagttggcgctgaccgtgactacagttttctggtgatggattatctcccacctcgtccgctggatgcgcatagcgcatttattcttggtcagcaaattgcgcgtttacatcaatggagcgaccaaccacaatttggccttgatttcgataacgcgctctccacaactccacagcccaacacctggcaacgtcgctggagtacgttttttgctgaacaacggattggctggcagttggaactggctgcagaaaaagggatcgctttcggcaatatcgacgccatcgtcgagcatattcagcagcgtctggccagtcatcaaccgcagccttctctgttgcacggcgatttatggtccggcaactgtgcactgggtccggatggcccgtacattttcgacccggcctgctactggggtgaccgagagtgcgacctggcgatgttaccgctgcatactgaacagccgccacaaatctatgacggctatcagagtgtatccccgctacctgccgatttccttgaacgtcaaccggtttaccaactctacacgctgttaaatcgtgcaaggttatttggcggtcagcatttggttattgctcagcagagtttggatagattattagcagcatgatatgggttgaggataatggccgctccgtgcggccttttgattaaataaacccaagcagagaaaagaacacataacctgcagcaatacaaataaccggcaggatatacagactgaaaaactgcaggaaaatagtatggtgcggaacaacaatacgggactcaatttgttcacgcgttagcccctcttcccctttggctttttccagaatgagttgatcttcaacaccttcccgcaagaagcgcgcctggcgactcatccgggcaccggaatcctgcaacgccagtccgacaaaaatcaggatgaaaatcacccagaacataacgttcacgccaccattaaaattgggcgtcggggagttataccagaatagattcaaaaaaggcgtattcgcctgcatcatatcgatcatgacatgagtaaagtcgagcatgaccgcattaatgccttccttgttttcctgccgggtattcataaatttcagcaaagaaatcaatgtagagatcaatgcaggtataaaaatcacccaacccaaaatccttttcaaaacagcaatgcgtccagcttgttgatacgtcatgagttctccttgattaagacgcgtcgtttcacttagtttacctgtagatatctgttttcgcccattctttaaaggcgatatgataggcgcttaatcataagcacggcttaataccttacacataatgctctaaaggagaggttgtaatgagtaccccgcgtcagattcttgctgcaatttttgatatggatggattacttatcgacagtgaacctttatgggatcgagccgaactggatgtgatggcaagcctgggggtggatatctcccgtcgtaacgagctgccggacaccttaggtttacgcatcgatatggtggtcgatctttggtacgcccggcaaccgtggaatgggccaagccgtcaggaagtagtagaacgggttattgcccgtgccattagtctggttgaagagacacgtccattattaccaggcgtgcgcgaagccgttgcgttatgcaaagaacaaggtttattggtgggactggcctccgcgagtccactacatatgctggaaaaagtgttgaccatgtttgacttacgcgacagtttcgatgccctcgccagcgccgaaaaactgccttacagcaagccgcatccgcaagtatatctcgactgcgcagcaaaactgggcgttgaccctctgacctgcgtagcgctggaagatagcgtaaatggcatgatcgcctctaaagcagcccgcatgcgttccatcgtcgttcctgcgccagaagcgcaaaatgatccacgttttgtattagcagacgtcaaacttagtagcctgacagaactcaccgcaaaagaccttctcggttaatgaccaggggcagtgatctcgctgcccctggttctttatctgaaattgcattcaactgacggattaatcgtcaatttaagagaaagagttacaccgtcaccacttccgtgcactgtataaaaatcctatactgtacgtatcgacagtttagtgagttttatcatgacggcggaaggtcaccttctcttttctattgcttgtgcggtatttgccaaaaatgccgagctgacgcccgtgctggcacagggtgactggtggcatattgtcccttccgcaatcctgacgtgtttgttaccggacatcgatcacccaaagagctttcttgggcagcgattaaaatggataagtaaaccgatcgcccgcgcttttgggcatcgtggttttacccacagtctgctggcggtatttgcgctgctggcaaccttttaccttaaggttccggaaggctggttcattccggctgatgcgctacaaggaatggtgctgggttatttgagccacatacttgccgatatgctgacacccgccggtgttcccctgctctggccatgccgctggcgtttccgcttgcctatcctggttccccaaaagggcaaccaactggaacgttttatctgcatggcattatttgtctggagcgtatggatgccccatagtttacccgagaacagcgctgttcgttggagtagccaaatgatcaataccttgcagatccagtttcatcggcttattaagcatcaggttgaatactaaaaaggcaaaaatcacctttctggaataagcaattccatttgaatataagagccagctcacagttctgttaatcttgcgccaacactatgactgctacgcagtgatagaaataataagatcaggagaacggggatgaactttccattaattgcgaacatcgtggtgttcgttgtactgctgtttgcgctggctcagacccgccataaacagtggagtctggcgaaaaaagtgctggtgggtctggtgatgggtgtggtttttggccttgccctgcataccatttatggttctgacagccaggtacttaaagattctgtacagtggtttaacatcgttggtaacggctatgttcaactgctgcaaatgatcgttatgccgttagtcttcgcctctattctgagcgcggttgcccgtctgcataacgcatctcagttaggcaaaatcagttttctgaccatcggtacgcttttgtttaccacgctgattgcggcgctggtcggtgtgctggtcaccaacctgtttggtttgacggctgaaggtctggttcagggtggtgcagaaactgcacgtctgaacgccattgaaagtaactatgttggtaaagtctctgatctgagcgttccgcagctggtcttgtcctttatcccgaaaaacccgtttgccgatcttaccggagccaatccgacgagtattatcagcgtggtaatttttgccgcattcctcggcgtagctgcattgaaactgctgaaggatgatgcgccgaaaggtgaacgcgtcttagccgctatcgataccctacaaagctgggtgatgaaactggttcgcctggtcatgcagttgaccccttacggcgttctggctctaatgaccaaagtggttgcaggttctaacttgcaagacatcatcaaactgggaagtttcgttgtcgcgtcctacctcggtctgctgattatgtttgcagtgcatggcattctgctgggcattaatggcgtgagtccgctgaagtacttccgtaaggtatggcctgtgctgacgtttgcctttaccagccgttccagtgctgcgtctatcccactgaatgtggaagcacaaacgcgtcgtctgggcgttcctgaatccatcgccagtttcgccgcctctttcggtgcaaccattggtcagaacggctgcgccggtttgtatccggcaatgctggcggtgatggttgcgcctacggttggcattaacccgctggacccgatgtggattgcgacgctggtcggtattgttaccgttagttccgcaggcgttgccggtgtcggtggtggtgcaactttcgccgcactgattgtactgcctgcgatgggcctgccagtaaccctggtggcgctgttaatctccgttgaaccgcttatcgacatgggccgtacggcgttaaacgttagtggcagcatgacagctggcacgctgaccagccagtggctgaagcaaaccgataaagccattctggatagcgaagacgacgccgaactggcacaccattaattcttatgctggcaacggtccgttttgtataggggccgttgccttactttttaaatgttccatcgcggcgatgcatacactctcatatttaaacagatcgtcagcgaaaaaaatgtccaacttatcaatacattcctggctcaaactatgtgcctgtaggctgaagcttaaaacctcatacccgagacgttttctaagactactatctggaatactcataatatcttcaagcacaccacttcccattcccggaagatttagtggattaaaaagaagattgatattaagcatacttattatgctaggaaactttaggagactctcatttttttgaatcgcagcaaaaatgctcccgacaggatgtatataattttgttcatagtatatagtccttaaatagtgaataaccaacctgttttttatactgatcaaattggtcattttttctgggcgaaatacagaagtgacatccattccaataaaatctttatttatacctcttatccgaatttcactaccataaagattattaattattactctatatttaacattgtcctgcagatatgtatcaaaactaagtgctggcgctcctggcttactggcatcatagttaatgttagacatataggcaatcatataattaaagttactttctgctatttcatcgcagtcacattgacccgtacttataaagaaagtgagtgctgtcatagtagactgcagcctttctttaaaagagtcgaaagccaggcttttaatatttaaatcaccataattactctgtattaagtttgtagaaaacatctcccgcctcatattgttaacaaaattattatctcatttaaatctaagtcatttacaatataagtttaagagcgacgccacaggatgaactatcaaaaatagctcatcatgattagcaaaacttaaccattttaaaataaataaacaattaaagaaaaaagatcacttatttatagcaatagatcgtcaaaggcagctttttgttacaggtggtttgaatgaatgtagcaacgaaatacagaatttcaggtcatgtaactcccggcaaaaccgggaggtatgtaatccttactcagtcacttccccttcctggcggatctgatttgcccaacgttgggcagattcaggcacagtaaacgccggactgcgcagaaaactctctcccatcagtacaaacgcaacatatttgccacgcagcatccagacatcacgaaagctatccatctttatcgcatgttctggcggcgcgggttccgtgcgtgggacatagctaataatctggcggttttgctggcggagcggtttcttcattactggcttcactaaacgcatattaaaaatcagaaaaactgtagtttagccgatttagcccctgtacgtcccgctttgcgtgtatttcataacaccgtttccagaatagtctccgaagcgggatctggctggtggtctatagttagagagttttttgaccaaaacagcggccctttcagtaataaattaaggagacgagttcaatgagccaacataacgaaaagaacccacatcagcaccagagtccactacacgattccagcgaagcgaaaccggggatggacagtctggcacctgaggacggctctcatcgtccagcggctgaaccaacaccgccaggtgcacaacctaccgccccagggagcctgaaagcccctgatacgcgtaacgaaaaacttaattctctggaagacgtacgcaaaggcagtgaaaattatgcgctgaccactaatcagggcgtgcgcatcgccgacgatcaaaacagtctgcgtgccggtagccgtggtccaacgctgctggaagattttattctgcgcgagaaaatcacccactttgaccatgagcgcattccggaacgtattgttcatgcacgcggaagtgccgctcacggttatttccagccatataaaagcttaagcgatattaccaaagcggatttcctcagtgatccgaacaaaatcaccccagtatttgtacgtttctctaccgttcagggtggtgctggctctgctgataccgtgcgtgatatccgtggctttgccaccaagttctataccgaagagggtatttttgacctcgttggcaataacacgccaatcttctttatccaggatgcgcataaattccccgattttgttcatgcggtaaaaccagaaccgcactgggcaattccacaagggcaaagtgcccacgatactttctgggattatgtttctctgcaacctgaaactctgcacaacgtgatgtgggcgatgagcgatcgcggcatcccccgcagttaccgcaccatggaaggcttcggtattcacaccttccgcctgattaatgccgaagggaaggcaacgtttgtacgtttccactggaaaccactggcaggtaaagccagtctcgtttgggatgaagcacaaaaactcaccggacgtgacccggacttccaccgccgcgagttgtgggaagccattgaagcaggcgattttccggaatacgaactgggcttccagttgattcctgaagaagatgaattcaagttcgacttcgatcttctcgatccaaccaaacttatcccggaagaactggtgcccgttcagcgtgtcggcaaaatggtgctcaatcgcaacccggataacttctttgctgaaaacgaacaggcggctttccatcctgggcatatcgtgccgggactggacttcaccaacgatccgctgttgcagggacgtttgttctcctataccgatacacaaatcagtcgtcttggtgggccgaatttccatgagattccgattaaccgtccgacctgcccttaccataatttccagcgtgacggcatgcatcgcatggggatcgacactaacccggcgaattacgaaccgaacagcattaacgataactggccgcgcgaaacaccgccggggccgaaacgcggcggttttgaaagttaccaggagcgcgtggaaggcaataaagttcgcgagcgcagcccaagctttggcgaatattattcccatccgcgtctgttctggctaagtcagacgccatttgagcagcgccatattgtcgatggtttcagttttgagttaagcaaagtcgttcgtccgtatattcgtgagcgcgttgttgaccagctggcgcatattgatctcactctggcccaggcggtggcgaaaaatctcggtatcgaactgactgacgaccagctgaatatcaccccacctccggacgtcaacggtctgaaaaaggatccatccttaagtttgtacgccattcctgacggtgatgtgaaaggtcgcgtggtagcgattttacttaatgatgaagtgagaagcgcagaccttctggccattctcaaggcgctgaaggccaaaggcgttcatgccaaactgctctactcccgaatgggtgaagtgactgcggatgacggtacggtgttgcctatagccgctacctttgccggtgcacctagcctgacggtcgatgcggtcattgtcccttgcggcaatatcgcggatatcgctgacaacggcgatgccaactactacctgatggaagcctacaaacaccttaaaccgattgcgctggcgggtgacgcgcgcaagtttaaagcaacaatcaagatcgctgaccagggtgaagaagggattgtggaagctgacagcgctgacggtagttttatggatgaactgctaacgctgatggcagcacaccgcgtgtggagtcgcattcctaagattgacaaaattcctgcctgatgggaggcggcgcaattgcgccgcctcaaatgatttacatagtgcgctttgtttatgccggatgcggcgtgaacgccttatccggcctacaaaactgtgcaaattcaatatattgcaggaaacacgtaggcctgataagcgaagcgcatcaggcagttttgcgtttgtcagcagtctcaagcggcgcagttacgccgcctttgtaggaattaatcgccggatgcaaggttcacgccgcatctggcaaacatcctcacttacacatcccgataactccccaaccgataaccacgctgagcgatagcacctttcaagctcgcacttgtcaacacatccagctccgttaagcgtgggaaacagtaagcactctgacggatagtattatcgataaacgccggatgacacatcacctccaggctacgatcaccccgatggcctgcgtcatccagcacttgcaggaacaggctctcactgatctcttcaccgtagaatgcactgctgaatccctgggtagtgcgcaggttgaccggcaaatcaaacgccatctgacgatccgcccgcaacgcaatgccctgctctgccgcaaacctggcaacaatcgggaaaatctgcgggaacatatgcacatgatgatggctatcaagatgcgtaggtttgcgtccaaatagctcaatgaaacgcaaatactgactgacaagctcctgagtaatttcttccagcggtaaagcatcttcttctgccaactgccagatccattttcccagcacaccatcgcgggttaaccccggcatagctgtcagtggcttacccatagtaaggacaaagtgcatccctatggccagactcggttcatcacgactcaactgcaccgcatggtcaatagcctgcccattcaccagcgccgtcgtgctcgtgacaatcccattgcgacaggcctcgataatgccgtagttctgacctttgcttaagccaaaatcatcggcattaacaatcagtaagcgttccataatcagcctcggttaatgtgcttttttaagctctgcgatgcagtcggcaaagtttggcagccatttctcgtgcgccagaatcatctcgcgtgctagcagctcagcatcgcgatcggaatgcaccaacggactaaggtttagcgccagtaacacatcgttaaattctccgctaagtgcggcgttactggcagcaatctcgaagcctttaatggtgtgaatcagccccattactttatcatcgaaatgcgtaatgcgcggatgtggcgtcgcgccatcgcgccccagcttacaggtcatttctactgcccagtctgccggaatattatcaatctgcccatgatgcgggatattaacgtaatgttctgcttgcttgtcgttgtagatagcgttgatcacttcgcatgctgcatcagagtaataagccccaccgcgctgttccagttctttcggcttaactttcagctcaggatttttatacagctcaaaaagttgtttctcgactttctgtactacctgcgctcgtgcgccgcctttgtagtattcgcccatttcaatagccagcatctctttctgcttgaagtaatacagcagataagaacatggcagcagattcaagctacgaattaagccctcactaaatggcagatcgaaaatattttttacagaggacgcttttaactgcccactcgccacaccatcaagcaattcggcaaagcggctcttgccatttatcagcacatccttaatgaacaccatatggttgaggccgaacaaatcgatagataaatcatcgctgtctttcagcatcagaacatcgcgaataaacatcttcatgccgatcggaatattacacacgccgataaagcgtttaaatccggtatgacgataaacggcttcagtgaccattcccgccgggttagtgaagttaatcacccatgcattcggacaaagttcttcgacatcttttacgatgtcaaaaatcaccggaatggtacgcagacctttaaacaaaccgcccgcgccgttggtttcctgaccaagataaccatgacttaatggaatacgttcatccagttcacgcgccggtaattggccaacgcgcagttgggtagtaacgaaatcagcatctttcaatgcttcgcggcgatccagcgttttataaagcttcatcgggacgccagcgttatcaatcatccgttggcagagatcgaaaataatatccagtttcggtttaccaccttcgacatccaccagccataattcgctgaccggcaattcgtgataacgcttaataaatccttccagtaactccggggtatagctgctcccgccaccaatagtgacgacttttaatttctggctcataatttctcccttcagtacagaatactgatatctggcatatctgccccccggacataaataatccagcaacaggacagatatgtgaattgtcaggtataacgacttgctgattaaattcagtcaatttcttacgatagctcttaggcgtaaaggacgttaatttcttaaacgttttaataaacaaactcgggctactataaccggcctcaaacgcaatatccgtcacactatagttggtcatttccagttgttttttggcaaaattaatacggatttcattaataatctgcattggcgttttgccataatatcgttgagtcgctcgcgtcaaatattcctgacttttggcactcaacgccaccatattctccagcgcgctttcactaaactgctctttatcatgcatcttttctaccgtacttttcagccactgcggtacatcatcaatcacctgttcttcgcggtaatgacgtaaacggttaatgacataaaaagtaaccatctcaacaaactcttccagccctgtttcgcggaaattcaaactagaaatcactgtttccacataggtgagaaaagcgttattggtccggtatacctggctagcgacaaagcaataaggcaacaatggcaggtaatgctgctcaaaaaagcgtttactgatcccaacgttcaatatgcgcgtggcaccaaactcataaaaactttgatggtggctacctaacgaaataaaaacaaaatcgccccgttccagtaacacgcgcttaccgttaatctcctggaaataacgcccggttaataccagagtaaattcataatagtcgtgctgatgcagtccgctgatactctcagttttgttatagataaacacatggaagtttttgccattaaacaactgctgttctcgggcagtggcaatttccggcgcgttaatcactggctgcatcatcgactccttatgccttcagtttttcatgaagctcaattaattcagtaatcagttcacgcgcaagcatggacgtcattaaatgatcctgagcgtggaccagcaccagactcactttcatcttaccttcgcccgcatcgccttcaatcagtttcgtctgtaccagatgcgcttcattcaatgccatccgactctgatccatcatggcttttgctgcggcaaaatcgccctgcttcgcctgtttcagtgccgcatacgccaggctgcgcgcttgtccggagttgatgatcagccccatcaccacttcttccagctcttcagcttccgtttgcgtatcgggaatgttatcgagatccatcatacatcgttcctctcttttcttaccggcacgattacccgtaccggcatcgattaaaatttcagggcgttagcgatatcttcttcgctctcttctttatcaatcgcattttgtgctttgttagccaccacaacaaagggcagataaattaacgttgcgatgccaaggttgaagagtgcgaccagcaatgcggcgacgctaccgttggtgttaaagaaggctcccagaccggttggcatggtccacggtgcaatattggtcaccggaggaataatgcccatgtagtacgctgcgagggtgattgccgccagaatcggttgtaccagtacaaacgggataaacatcaccgggttcatgataattggcagaccaaacagaatcggttcgttaatctggaagatgccggacggcagcgccagttttgccacctgacgataatcagcacggcgagaggcgataaagatagccaggatcaggcctaaagtcgcaccactgcccccaaggaaaataaaggagtccagcatcggcttggcccagatatggaaggtcttaccggctgccagcgccgcttcgacggaaccatattgctgataggtcgcgatattttccagtgcccacggcgtcataatgccgttgtccagtgcggtcagcgccagcgcgccatgaataccgaagaaccagagcagtggaacaaagatcacataggcccagcccaccacgctacccaagcttgccagtggggtactgatggtatccataatgatctgatggaagttggtgccccaggtattcaacgcccaggcaataatccccatcacggaaagaataataaagccgggaattaatgcgctgaaggaacggcttacactagcaggtacgctgtcgggcagtttaatgacccaattgcggcggacaataaaggtaaacatttctgccaccaccaggccaataataatcccggagatgatattcgccccacctaaccagtttgcaccaaccgcataggcctcaccgacactatatggggtgacggtcataaatgctgcaacggataacaacccagccgccagcgcatcgactttacgctcttctgccagcgccatgccaataaagaacggtgccattaaagacattattcctaatgttccgttatatacgttgccgccaatacctttcagaccattaagtgtttcaatggtactggcgtcgaggcgaatacctaaggaataaaaaaagctcccctccccaaagcttagaaaaacgttgttaattaatacaaacatggcccccgcaagggttaacggcattaagcgaataaagccatttttgattgcattaacgtgtggctgctttcctattttaactgcaaaagggaggagtaccttttcaaggcttgcaataacattactcatagaaaaatacccttaaaaaccgcaatttaaatattgcggtattgatttatgaaataactctttgacgggaaaatttaaaataaattaatttgctgcggcttttttaatcgctgcaaccgcagccttaagcacgcctaaaccatcgactttgccataaagcaggctgtcaattacttcaaccggtttgttgggtaacaaacgctggatttcgggcaacatataagcaatctgcggccctaataacacgacatcggcattctgacctttttcaccagccagtgtttccggaaatgcttcaataatgaccggaacttcatatttttctgcctgtgcgcgcattttacttaccagtaaagaggtagacatgcccgcagaacaaaacagataaatgtgtttcttttccataaaactgccctcatcgacgattatctgtcagccagacactccgcaagccttaacctgcttccatgctctgggtaacttgcgaaaccaacatgactttttttgtggctgaaaggagtatacggtatagacctgagcaatagtatttctttgaccttataaattgtttctccttgacctgtggttatgaccctcttcacatttcgggcaaataattcgcgaagataattaagaactcaggccaaaaaaaaccggcgcaatggccggtttccgttgttactcaagctttcagacgaattgattacttcgcagcctgtggatcagtgtcgtattcagcacaggtctgataaccggagttgatgacatatccggtatcatctaacgcgacaaagtaggtttctgctttaccatcacgttgacccaggatgtaggtctggcaagtaccgcgagcatggatcatgctcacttcagagctaggtttacccgcaatttgtgcaacctgcgcccggctcatgccttttttgacgtctttcaccacaggctgtacaaactggtctttggtacgatcataagccgtacaacccgccagcatggttaataccgccgctgcactcagaattcctgccatattcttgttcatattccgtcctcttgtttatcagcgtgttagataagcctggaatacattgggcgctttttcaagcccgtgaacgaaacggctccgctttcagaggattcctgtatgacgttttaaccaccattcagcccgctgtcgcttgtcgtttcagtagcaacgggttagctttaaggaagttttgtcttttctgtctggaggggttcaatgacattgcaacaacaaataataaaggcgctgggcgcaaaaccgcagattaatgctgaagaggaaattcgtcgtagtgtcgattttctgaaaagctacctgcaaacttatccgttcattaaaagtctggtgctcgggatcagcggcggtcaggactccacgcttgccggaaagctgtgccagatggcgattaatgagctgcgcctggaaaccggcaacgaaagtctgcaatttattgccgtacgcctgccctatggtgttcaggccgacgaacaagattgccaggatgccattgcctttattcaaccggatcgcgtattaaccgttaatatcaagggcgcggtattggccagcgaacaggcattgcgggaagcaggcattgaactgagcgattttgtccgtggcaatgaaaaagcgcgtgagcggatgaaagcacaatatagcattgcgggtatgaccagcggtgtcgtggtgggcaccgatcatgcagcagaagccattaccggattcttcactaaatatggtgacggcggtacggacattaatccgctgtatcgtctcaacaaacgtcagggtaaacagttactggcggcattagcttgcccggaacacctttataagaaagcgccaacggccgatctggaagatgatcgcccttctctgccagatgaagtggcactcggcgtgacctatgacaatatcgacgactatctggaagggaaaaacgtacctcaacaggtcgccagaacaatagagaactggtatctgaaaaccgaacataaacgccgtccgccaattaccgttttcgatgatttctggaaaaagtaataatttgcacatattggattgtgcgaaaaagagtaatttgttcacgccggatgcggcgtgaacgccttattcgacctataaaactatgcaaattcaatacattgcaggagtcgaataggcctgacaggcgtagcacgtcagacggtgtaacctttgtcatcgacccgcctcttttttaatcgcttcccgcctgttacactggatagataaccagcattcggagtcaacagtggtacggcgtttaacttctccgcggctcgaatttgaagctgcggcaatttatgaatatcccgaacatttacgtagtttccttaatgacttacccacccgaccaggggtgtatctgtttcatggtgaaagtgacaccatgccgctctatatcggcaaaagcgttaacatccgcagccgcgtcctttctcatttacgtaccccggatgaagccgccatgctacggcaatcccgacggatcagctggatatgtaccgccggtgaaatcggcgctctgctccttgaagcgcgattaatcaaagaacaacagccgctgtttaataaacggttgcgccgcaatcgccagctctgtgccctgcaattaaatgaaaagcgcgtcgatgtggtgtatgccaaagaggtggattttagtcgagcccccaacctgtttggcctgtttgccaataggcgcgcagctttgcaagcattgcagaccatcgctgatgaacaaaaactttgttatggcctgctgggactggaaccgttaagtcgcggtcgtgcatgttttcgtagtgcgctaaaacgttgcgccggagcatgctgcggtaaagagagccatgaggaacatgcgctacgcttgcgccagtctctggagcgtttgcgggtggtgtgttggccttggcaaggggcggtggcgctgaaagaacagcacccggaaatgactcaatatcatattattcaaaactggctgtggctgggggcggttaatagcctggaagaagcgacaacgttaattcggacacccgccgggtttgatcacgacggttataaaattctttgtaagccgctgctttccggtaactatgaaattactgaacttgatccggcgaatgaccagcgagccagttgattactgaacttgatccgggctatgaccagcgagccagttgatttcactgaacaacagtttaccttgcggttgtaaaagccgcagggtgtgcctgccatcgaaccagcacgcgccctggtcggtagtgagcaatttatcgcccagttgccacgccccgttaatcacaaacaccaccccgccgcgactgccaaaggtagtaaacgtacgttcggcaattctgactttcgccttacagacatccaggcgtgtcatgatgttgaaatccatgctcatctgccctgccgtcagtttcgcttttaccacctggtccgctgcaaaggcaaaaggctggaacggttttaaggtatggttaaagcggtctgcgctttcaaggagcatctcgccgccttccagcaacgtcactatcctttccatgccgggaaacaaagaaaactccccattcgccgcgatggatgcaatgctggcacgccagtaaaaatcacgttttgccggtgggaacgtgcaaatttcgcgcgtttcaccggcagcatttcgccacagattcacgctcattttacgcatatcaaagtattccatactcgctcccggcccgttcttttcattgttatcgttcaggtaaccgtggatggttatcggcaactcgggtgatttacgttagtggtgatcaggctttttttacaactgtttgagaagagaaaagaaaaccgccgatcctgtccaccgcattactgcaaggtagtggacaagaccggcggtcttaagttttttggctgaaagattattcagcagttgcaggcattttaccttttgccgctggacgttctgtcagacgcttctcaaaattagcattaaattgctttttctgttccggcgtcaggatgttgtaaattttgttctgggtttccatgtgcgccagcatgttagctttgcgctgttcttccatttttgcgatctgcgcttcagcttttactttatcgaaggtatcgctggcaatgatgtcatgcattgcgcggcgttcttccagcggcggacgtttcatctggtcacgctggcctttcatgatttcgcggatctgctgtttctgcgcgtcggtcaggttcaggtctttgaacatcatgtcctgatgcggaccgaacttgcctttgtggtgcatcatcggcttcgcgtcagccggtgctgcggtagtggtgtctgcggcatgggccaggttagccgcgccaagagccagggtagaggcaacaaacagtgcagttaatttacgcatattctatatccttcctttcagttatttattacggctttcttaagtagcgtgccgtgttgacgagattaactttactgactttagcgtcaattaatcagagcaacggtaaaacaatgaaagtgtaaaaaacacttttgcgccaattatggagaaaaaaagaaaatttgatggagagtgatgagagaatattacaacacgatgattttgcagagattatgaagaactataccggatgactggtgataaataaagcaaataaccaggattaatctgtattaatttataagaaagcaacttaatacccgcagaatgatttctgcgggtaagtattagcttattttttcgagcattaatcccgcgcgtaatcccaacgctaccaacggattagggaataacacatactctacatcatgggttacggtaaaacgttcctctccgtcctgcgccagcaatgttcctttctcaaacggcataaaattcagcgtgtcacttgccatatgcatttcgaaggacgggctgtggcgagtaatttggctaaccacccgataacggagcggcggtgttctcacgataccgacactctcaccagatagcagcgcagcaattgcgctggcagttactgcaaactggcgaagatcgttttgcccaaagggcaacgctttgccaagttccagcgtacaggccagcgcgccaaaatgtctggcgctgaaatgggtaaacgtaccaccaggttcctgatggaacaccagcgcctccagccccgccgcacccagccacgtcagaaatttctcgtcccagggaatgtcgcgttgcggtaatacaccgaactgcggatgcaaggagccacgaattgcggtatgtagatcaaggtgccagcgcacagattctttgccctggtcataaaaatcttccaggcactgttccagttcgcgcgcccgacaggtttctccgctttcagcaaatagctgccaacgaccgccaaacattcgattcatatcgctatggcaataacgtttcccttgcttcagcgcaggaggattcccgaggatcaccagcaaccgccaacgtaacgggatctcgccgtgagatatcgcgccaagcaacgcgtccagcatctccacaggtgccgtctcattaccgtgtattcccgcactaatcaccagtgcgccttgcggtggcgttaatggcgtcagttccagcacaccatcgcccagccagcgccagcgaacgccgttgatttctcgctcggtgataaccggttttttacccgttaaggtcagagcaagaaaattatccattgccccctccctcgcgctggaacggataaacgctaccgagattcagtaattggctcaatacatccagtgcttcccgcccttcgcgcagcaattgcgggtcggccagatcggcagcagtaaggcgatcgcggtagtaacgatccacccagtcattgagcgcattaaacagcgtatcgttcatcatcaccgccggattcaccgcccggcgttcttcttctgtcaataccacccgcaaccgcaggcacgccgggccgccgccattcgccatgctttcacgtaaatcaaagacttttagttcgctaatcgggttgtcagcggcaaggagttcattgagataaccccatactccggcgtgttcccgacactcctgaggcagcaccaacatcatggaaccatcatcgcggctcagcagttggctgttaaacagataggtagacaccgtatcagacacggaaacctgagttgccggaacttctatcgccataaaaccattgacccgcgcacgcaggtttgccagtaactgactctggcgagcgaacgcctgttggtggcaaaacagcacctggcggttactcacggcaatcacgtcattatgaaaaacgccctggtcgataacgtccgggttttgctgggcgaaaatcacctgttggggattcacctgattcagccttgccaccgcctcgctggcttcgcgagtctgtcgcgccggataacgggaaggccgggtatcattgccttcttctcgcccgtagacaaaaagttgcatacccggttcaccgtaatgaccgccgagacgattgtggtttgccgccccctcatcaccgagcaacgctacctgtggcaacgcgctatggacgctaaatttctcttcgtcgttaaaaatcgcttttaacaggctttcagtgacgggcgcttccaggctacggtgaaatttattgttcaggttggcaacggtgagatgcactttgccatccagcgtatcggcagatggcgcgatcgttgccgcattggctacccacattgggctagcggaactgacgctggaaagccagtgcggtgcctggcgtgcaactttttccagtacctgctcatcgctaccactgaatcccaactgacgcagcaccggaataaacggacgctcgtgcggcgggatcacggcctgggggaatcccgcatcggcaagggctttcattttcagtaagccctgcttcgccgccagtcgcgggttagacacctgaaaacggtgacgggtagaggcttcattaccaaagctcaggcccgcgtaatgatgcgtcagccctaccagcccgtcgaaattgacttcccaggcgttcatcgcaccacctcatcggaaaaatccagcccggggttaagcgtggcgggcaatgttaagctgtcgctctccaggctcgccatcggccatgcgcagtaatctgcggcataccaggcgctggggcgatggttaccggaagcaccaatgccgccgaatggcgcggtactggcagcaccggtaagcggtttgttccagttaacaatccccgcccgcgcctccagcaacagttgatcgaacttttcccgctcgggggaaaccagaccgcaagagagtccgaagcgagtgttattcgccattcgaatcgcttcatcgaaagtatcataacgccagacgcgcaataacggtccgaacacctcttcatctggtacgccagcaacgcctgtcatttcaatgatccccggcgtcagcaagcttgtccctgcttgtaataagcgcggcgcaagcaggggtcgtccgcccatcgcttccagttgctgccatgcagtaaccacctgctgtgcggcctgttcagaaatcagcccgccaataaacggctgcggttcgtcatcccagttgcccggcgttaatcgctggctgacggcaaccagacgagcaagaaacgcatcgccctgcgccccgcttttcagcaataaacggcgggcgcaggtgcagcgttgaccggctgtgacaaacgcgctctgaatggtcagatggacagccgcgtcgatatccgccacctcatcgataattagcggattattaccgcccatctcaagggcgagaattttctccggctgaccggagagctggcgatgcaactggtagcctgtattggcgctaccggtaaacagcaaaccgtcgagatcctccagcgcactcagcgcctgacccgtttcacgcccgccctgcaccaggttcagcacgcctggcggcaagccagcctgctgccataaacgcattaccgcttcgccactccacggtgtcagttcgctgggtttaaagataatggtgttacctgccagcaatgccggaacgatatgtccgttcggcaaatgaccagggaaattatacggcccaaacaccgccagcacgccgtgcgggcgatgtcgcaggctcgccgcgccgtccggcatttcactacgctgctcgccggtacgaacgtgatacgccttaatacttatcgcgattttattgatcatcgccgtcacttcggttgccgcttcccagcgcggcttacccgtttctctggcaataatcgcggttaattcggctttattgctttccagcagtgcggcaaagcgttcgacaacggcatgacgttcagcaaaactaagccgcgcccagcgcggaaacgccgcacgggctgcccgacaagcctgctcgacctgagcggcatcggcatcattgccttgccataacacctcgccgcttaccggattacgcttcacacggcttgcgccctggcccgttatccagtcaccgttaatccataaagtcatgctgttttctcctctgcgcacaggcgcaccagacgaacgcgatccccggcgtggcatttgagggcatccagttgtgcggcggttaaaatcaaacgctcggttgccggatcggtacgcaccagcaccacgcggaaatggtgataattttcattggcgaccaggcaggctgggaaatcgccctgcgcaggctgcccttctgccacttccaccagccgacttttacggatggcgcgcacgcggtcgatgtcacactcaagcgtcggcccaccgtcaaagatgtcgatatagttacggtagcgaaaaccttctttctccagcaccgcgcgggcaggcgcggtttgcggatgtacctgaccgatgacgtcctgggcttcctgggataaaaagtgggtatagatcggatgtttcggcatcagttctgcaataaatgccttttgcccggtgccgcagagaaaatcggcgcggctaaaatccatgctaaagaagcgtttaccgaggctttgccagaacggactatagccgtgttcgtcaatcaccccgcgcatttcagcaaccactttgtcattaaacttgtcgcgaaaagccgccataaacataaagcggcttttgctcagcaaatagccgttgccctctttgcgccagtccgggtcgagaaacagcgtgcacagctcgctgctgccggtgtgatcgttactgagaaacagcgtcggcaatgcgttatagacattcagctctttactggcgtgaaccaacgtgccgacgcgatagttgtaccagggatcgttcagcccaaccgccacctcaatggcacaaatccccgccacggtgcctgtctcgctatcttccagcacgaacacatagccctgctcacttttgggcagttcgccttgccaggttttgattgccctttcgatacgcgcgctaagcgtggcttcattggcgggaaggctcgtcaggccgccgcccgttttgctggcaagctgcatcagcgcgctgacatcacttcgctcaacgggacggatgaccatcatgatgaacctcggctaacaaattatttcaactactacctcggctaacaaagtgttcgcaagcagctgcaaagcgatccagtccggtcgtcacctcttcttcgctgacattgagcgcaggcgcaaaacgcaccacgttgccacccgcaatcagtaccatcacgcctgctttcgccgcttcctgagagatctgtttcgcttgcccggcgtaatcggcattcagtacacagccaatcagcaaacctaagccgcgaacttcactgaacaaaccatagcggtgattaatagtattaagacgctcaacaaaccagtcgtgacgctgtttaacgccattaagcatctctggtgtgttgatgagctccagcactttgcctgccaccgcgctggccagcggattaccgccataggtggtgccatgagtgccaacggtcatcacgcgggcgcactcttcggttgccaacaacgcaccgaccgggaaaccgccgcccagcgctttggcggtagttaacagatcaggcgtcacgccgtagtgcatataggcatacagttccccggtgcgcccgacgccggtttgtacttcatcaaaaatcaacagcgcattgtggcggttacacaattcacgcagaccttgtaaaaacgcgttgctggctggcaccacaccgccttccccctggatgggttcgacaatcaccgcacaggtagagtcgtcaatcagcgcgctggcagagttaatatcgttatatgcagcatgacgaatatccgccggcagtggcgcaaaatcctgactataggctggctgcccacccgcactgacagtaaacagcgtgcgaccatgaaacgcatttttgaacgccacgatgccgctcttatggctgccgtagcggtcgtgagcgaatttacgcgccagttttagcgccgcttcgttggcttccgcaccggagttacaaaagaagacgcgatcggcaaacgtggcgtcgatcaattttttcgccagtcgcagtaccggctcgttggtgtaaccgttgccggtatgccagaacttactcgcctgttcgttcagcgcttcacgcagttccggatgcgcatggcccagcgcgttcaccgcaatgccacccgcgaagtcgatatactctttcccctgctgatcccacaagcggctaccttcgccacgtaccggtataaagggtgccggagcgtaaacaggtatcatccattcatcaaagttttcacgcgtaattggctgagacatagcgacctctacagtaaataattcgttatttatatgttaataataagtaatgtttgcgctgtaaatgtagattgcagggttcgtgccagccagtgataaaagtgcataaacggcggaggctaactggaaatcaaggagttataaccaaaccatatgcatttaaagtgcatataaagtgaatacgtttgcgatgtgggtgaataaaaagaataaaaaacgcaatgttatgcagaagtaaaatataattctggaattgtgatcattgacgaaatttactggaaattactgcgccattctgacgcagcgcgcaccaaaagcgggcatttttttgcgccatcgttgacatcattaacaaccatcgatcaaatcacttaacaacaggcggtaagcaacgcgaaattctgctaccatccacgcactctttatctgaataaatggcagcgactatgaaatttgtctcttttaatatcaacggcctgcgcgccagacctcaccagcttgaagccatcgtcgaaaagcaccaaccggatgtgattggcctgcaggagacaaaagttcatgacgatatgtttccgctcgaagaggtggcgaagctcggctacaacgtgttttatcacgggcagaaaggccattatggcgtggcgctgctgaccaaagagacgccgattgccgtgcgtcgcggctttcccggtgacgacgaagaggcgcagcggcggattattatggcggaaatccccagtctgctgggtaatgtcaccgtgatcaacggttacttcccgcagggtgaaagccgcgaccatccgataaaattcccggcaaaagcgcagttttatcagaatctgcaaaactacctggaaaccgaactcaaacgtgataatccggtactgattatgggcgatatgaatatcagccctacagatctggatatcggcattggcgaagaaaaccgtaagcgctggctgcgtaccggtaaatgctctttcctgccggaagagcgcgaatggatggacaggctgatgagctgggggttggtcgataccttccgccatgcgaatccgcaaacagcagatcgtttcagttggtttgattaccgcagtaaaggttttgacgataaccgtggtctgcgcatcgacctgctgctcgccagccaaccgctggcagaatgttgcgtagaaaccggcatcgactatgaaatccgcagcatggaaaaaccgtccgatcacgcccccgtctgggcgaccttccgccgctaatttagcagctctcctggctcaaactgggtcaggagaattaaccttgagaaaaatcaacaaactgtcagtaatgatttgttgcctgccgtcctttgttataccgtctctgcgtttttagttgtctgaccacttctctattatcaagtttgatataggaaactccacgatgaacgctgagcgtaaatttctttttgcctgtcttatttttgcgctggtcatttacgctatccacgctttcggtttattcgatctgctcaccgatttaccccacttacagacactcatccgccagagcggatttttcggctatagcctctatattctgttattcatcattgccaccctcttgctgttaccaggaagcatactggtgatcgcgggaggaatagtttttggcccgctcttagggacactactcagtttaattgccgccacgctggcctccagctgcagtttcctgctggcgcgctggctgggacgtgatttactgctgaaatacgttggccatagcaataccttccaggccattgaaaaaggcattgcgcgtaacggtattgattttcttattctgacccgcttaatcccgttgtttccttacaatattcaaaattacgcttacggattaaccacaatcgccttctggccttatacccttattagcgcactcacgaccctacccggtattgttatttataccgtgatggcaagcgatctcgccaatgaaggcattacgctgcgctttattttacaactctgtctggcgggcctggcgctgtttattctcgtccagctcgcaaaactctacgcccgacacaaacatgtggatctgtctgctagccgccgcagcccacttactcacccaaaaaatgaaggataaaacgatgttgcaacattatagtgtgagttggaaaaaaggactggctgcactctgtttactggctgttgctgggcttagcggctgcgatcaacaagagaatgcggcggcaaaagtggaatacgacggacttagcaacagccaaccgctgcgtgtcgatgccaataaccatacggtaaccatgctggtgcaaattaatggtcgtttcctcaccgacgacactcgtcacggtattgtgtttaaagatggctccaacggacataaaagcctgtttatgggttatgcgaccccgaaagcattttatgaagccctgaaagaggcaggtggtacgccgggcgaaaacatgacgatggataataaagaaacgactcatgtcacaggcagcaaactggatattagcgtcaactggcaaggggcggcaaaagcgtattccttcgatgaagtgattgttgacagtaatggcaagaaactggacatgcgctttggcggtaatttaacggcagcagaagagaagaaaacgggttgcctggtgtgtctggatagctgcccggtcggcatcgtcagcaatgcaacatacacttatggtgcggttgaaaaacgtggtgaagttaaattcaaaggcaatgccagtgttctcccggcggataacacgctggcaacggttacctttaaaatcgccgaataaagccaggataaaggatgatgatgatgcaaagccgaaaaatctggtactaccgtataaccctcatcatcctgttgttcgctatgctgctggcatgggcgctgcttcccggcgtccatgagtttatcaatcgcagcgttgcggcgtttgccgccgtggaccaacagggtatagaacgctttattcagtcttacggcgcactggcggcagttgtcagcttcttgttgatgattttgcaggccattgctgcaccgctacctgcgtttttgatcacctttgccaatgcgagcctgtttggcgcgttctggggcggcttgctgagctggaccagtagcatggccggcgcggcgctgtgcttttttatcgccagagtgatgggccgcgaagtggtggaaaaattaaccggcaaaaccgtgcttgacagtatggacggctttttcactcgctacggcaaacacaccattctggtctgtcggttattgccttttgtccctttcgatccaatcagctatgctgccggtttgactagtatacgttttcgcagcttttttatcgccaccgggcttggtcagttaccggcaactattgtttattcctgggcgggcagcatgttaacaggcggtactttctggtttgtcaccggactgtttattctgtttgccctgaccgtggtgatttttatggcgaagaaaatatggcttgaacgccagaagaggaatgcctgatgggtttaccgccgcttagcaaaattcctttaattttacgtccacaggcgtggctgcatcgtcgccattacggcgaggtgctaagccccattcgctggtgggggcggatcccgtttatcttttatctggtgagcatgtttgttggctggctggagcgtaaacgcagtccgctcgatccggtagtacgaagccttgtcagcgcgcgcattgcgcaaatgtgcctgtgtgagttttgtgtggatatcaccagtatgaaagtcgccgagcgcaccggcagcagcgataaactgctggcagtggctgactggcggcaaagcccgctctttagcgatgaagaacggctggcgctggagtacgccgaagccgcaagcgtaacgccgccaacggtcgatgatgccctgcgtacccgactggctgcgcattttgacgctcaggcgctcaccgaactgacggcattgatcggcctgcaaaatctgagtgcccgttttaattctgccatggacattcccgctcaggggctgtgccgtattcctgaaaaacgttcttaaggagagatgatgcgccattgtgggtggttgctgggattgttaagcctgttttctctggcaacacatgccagtgactggcaagaaattaaaaatgaggccaaagggcaaaccgtctggtttaacgcctggggcggcgataccgcaattaaccgctatctcgactgggtgagcggcgagatgaaaacccattacgctataaacctgaagattgtccgtctggcggatgccgcagacgcggtgaagcgcattcagaccgaagccgcagccggacgtaaaacgggcggcagcgtggatctgctctgggtgaacggcgaaaacttccgcaccttaaaagaggccaatttattacaaacgggctgggcggagactctgcccaactggcgctatgtcgacacacagctgccggtgcgggaagatttttctgtgccgacacaaggtgcggaaagcccctggggcggcgcacaactgacgtttatcgcccgccgcgatgttacgccacagccaccacaaacgccgcaagccttactggagtttgctaaagccaatcccggcacggttacctatccgcgcccaccggactttaccggcacggcgtttcttgaacagttgctgattatgctgacgcccgatcccgccgcattaaaagaagcgccggacgatgcgactttcgcccgtgtcactgctcccttgtggcaatatcttgatgtgctgcatccgtatttgtggcgcgaaggaaaggatttcccgcctagtcccgcgcggatggatgctctgctgaaagccggcacattgcgcctgagcctgacctttaaccccgcgcatgcgcagcaaaaaatcgccagcggcgatttgcctgcaagcagttacagttttggctttcgcgaggggatgattggcaacgtgcatttcgtcaccattcctgccaacgcgaatgccagtgctgcggcgaaggtagttgccaatttcctgctcagtcccgatgcgcaactgcgtaaagcagatcccgctgtctggggcgatccttctgttctcgatccgcaaaaactgcctgacgggcagcgcgaaagtttgcaaagtagaatgccgcaggatctgccgccggtactggctgaaccgcacgcaggttgggtaaatgcgctggaacaagaatggctacaccgttacggtacgcattaatctttttgctgtgggcgatggtggcggtgatttatgcaccgctgatcccggcagctctcacgctgataagccctgctttgagcttgacacactggcaggcgttatttgccgatccacagttaccgcaggcattactggcaacgctggtgagcacaaccatcgcggcggtcggggcattgttgattgccctgctggtgattgtggcgctgtggcctgggccgaaatggcagcgtatgtgcgcccgtctgccgtggctgctcgccattccccatgtggcttttgccaccagcgcccttctgctctttgctgacggagggctgctttatgactatttcccgtatttcactccgccaatggaccgatttggcatcggtctgggcctcacccttgcagtgaaagaaagcgcatttctgctgtggatcttagcagcagtattgagcgaaaaatggctgttgcagcaggtcattgtgctggatagcctgggctacagccgctggcaatgcctgaactggctgctgttgccctccgtcgcgcctgcgctggcaatggcgatgctggcgattgttgcctggagcctgagcgtcgtggatgtggcaattattctcgggccaggtaatcccccgacgctggcggtaattagctggcagtggttaacccagggcgacattgaccaacaaacaaaaggcgcgcttgccagcctgctgttgatgctgttactcgccgcctacgttttgctgagctatctgctatggcgcagctggcggcgcactattccccgcgtagatggcgttcgcaagcctgccacgcctttattgccgggcaatacgctggcgatttttttacccttaaccggtgtgctgtgtgtggttctgctggcgatcctcgcggatcagagcacgatcaatagtgaagcgctcatcaacagcctgacaatggggctggtggcgacattcatcgctttgctcctgttactgctgtggctggaatgggggccacagcgtcgccagttgtggctatggttgcccattttattacctgctctgccactggtggcgggccagtacacgctggcgctatggctgaaactggatggaagctggacggcggtggtctgggggcatctgctgtgggtgatgccgtggatgctgtttatcctgcaacccgcctggcagcgcattgatagtcggttaattttgattgcgcaaacactgggctggagccgggccaaaatcttcttttacgtgaaatgcccactcatgttgcgccctgtgctgattgccttcgcggtgggatttgcagtcggtattgcgcagtatatgccaacgctgtggctgggcgcggggcgttttccgacgctcaccactgaggcggtggcattaagcagcggcggcagcaacggtattctcgccgcccaggctttatggcaactgctattaccgcttattatttttgccctgaccgcgttagtcgcaaaatgggtaggttatgtcagacaaggactccgctaatgctctgcgtgaaaaatgttagcctacgtttaccagaaagccgcttgctgacaaacgttaactttacggtggataaaggtgacattgtcacgttaatggggccgtctggctgtggaaaatccactctgtttagttggatgattggtgcactggccgaacagttttcttgtacaggtgagctatggctcaatgagcaacggattgacatcctacccaccgcacagcgtcagattggcattctttttcaggatgcactgttatttgaccagttcagtgtcgggcaaaatttactgctggcgctaccggcgacacttaaagggaatgcccgacgtaatgccgtgaatgatgcacttgagcgtagtggccttgagggagctttccatcaggatcctgccactttgtctggcggtcagcgagcgcgcgttgctctactacgcgcccttctcgcccaaccaaaagcgttactcctggatgagccattcagccgtcttgatgtggctctgcgcgataattttcgccagtgggtgttcagcgaagttcgcgccctggcgatccccgtcgttcaggtaacgcacgatctccaggatgttcctgctgatagttctgttctggatatggcgcagtggagtgaaaattacaacaaactgcgataacgcaaagtttttctcaatgcgtcagttcagaatggcgcactcaaaactacaatgtcgggattttcgatgaaacgtgtttctcaaatgaccgcgctggcaatggctttagggctggcttgcgcttctagctgggccgctgaactggcgaagcctcttacacttgaccagcttcaacaacaaaatggcaaagcgatagatactcgccccagcgcgttttataacggctggccacaaaccttaaatggcccttctggtcatgaacttgccgccttaaacctctctgccagctggcttgacaaaatgagcaccgaacagctcaacgcgtggatcaagcaacataacctgaaaaccgatgctccggtggcgctgtacggtaatgacaaagatgtcgacgccgtcaaaacgcgactgcaaaaagcaggtttaacgcatatctccatcctgagtgacgcgctaagcgaaccttcccgtctgcaaaaactgccgcattttgagcagctggtttatccgcaatggctgcacgacctgcaacaaggtaaagaggttacggcgaaacctgccggtgactggaaagtcattgaagcggcctggggcgctcctaagctttaccttatcagccatattcccggcgctgactacatcgataccaacgaagtggaaagtgaaccgctgtggaacaaagtttctgatgaacaactaaaagcgatgctggcaaaacacggcattcgccatgacaccacggtcattctgtatgggcgtgacgtatacgctgcagcgcgtgtggcgcagattatgctttatgctggtgtgaaagatgtgcgcctgctggatggcggctggcaaacctggtccgacgcgggactgcctgttgagcgcggaacgccaccgaaagtgaaagcggaaccggatttcggcgtgaagatcccggcacaaccgcagttgatgctcgatatggaacaggcccgtggactgctgcatcgccaggatgcaagcctggtgagcattcgtagctggccagaatttatcggtacgaccagcggttacagctatattaaaccaaaaggtgaaatagccggcgcacgttggggacacgctggtagcgacagcacgcatatggaagattttcataacccggatggcaccatgcgcagcgccgatgatattaccgctatgtggaaagcgtggaatatcaaaccagagcagcaagttagtttctactgcggcaccggctggcgcgcgtccgaaacctttatgtacgcacgcgccatgggttggaagaatgtttccgtgtatgacggcggctggtacgaatggagcagcgatccaaaaaatccggtagcaaccggtgaacgcggcccggacagtagcaaataacattgcaattactgacgctggaggctcttcagcgtcagatacccactccacacccgcgtaaaggtcgtcatccagcacaacgcaccgaagatccacgcaaaccacgcaaaccatgcagggaataaacatcccagcacaaacagtaagatcgtttctgtgccttcggttaatccccccagatagtaaaagctcttatgtgcataaccggggttatcaatctgatgttttgctgccagtgcagcaaaggcgagaaaactgctgcccgtgccgataaacgcaaacaacaaccagccgcctgccagcgcattttgctccggtgcagcaagaataaagccaaacggcaccagcgcgtaaaagagaaaatcgagagaaatatcaagaaagccgcccgcgtcggtaagctctctgcgccgcgccagcgcaccgtccagaccatcaagcagcctgttcaacaaaatgacgactagcgccgccagataccagcccagcgccagaaacggcagagccagcacgccgatggcaaatcccactaatgttaaaccatctggcgtaatgcccggtttatcaagaacccgcacgcactgatgcaacaacggtttaatccggggatgaagatggcggtctagcacaggcactccttaaatataaagcctttctgattgagcaacagtgcggatattatggcatttttcgcttatctgcccgtgtgtaatttatgaaaatgattgaagttgttgccgccatcattgaacgtgatggcaaaattttactcgcgcaacgccccgcccagagcgatcaggcgggattatgggagtttgccggtggtaaagtcgagccggatgaaagtcagcggcaggcgctggtgcgtgagttacgcgaagaactgggcatcgaagcaactgtgggtgaatatgttgccagccatcagcgagaagttagcgggcggattatccatcttcatgcctggcacgtacccgacttccacgggacgttacaggcacatgaacatcaggcgctggtctggtgcagtcctgaagaggcgctgcaatatccgctggcccctgctgacattccattattagaggcgtttatggctttacgcgccgccagaccagcggattaattatggctttacgcgccgccagaccagcggattagtgctaagggttttgtcatcacgctggcattgcagcagtattccttcggctttaattaccgccccttcagaataattttgatcctgataaacgcagcactgagtacagggctgcgcactctgcccgccactactgaacacttctggcggtacgtttacctccacgtccggacgataatgcgggttagccagtgcaattaatggaaatgctaatactacggcgaacaatgctcgactcacagggaactccttaacgttattgtctctgctactgataacggtagccgggtggcaaaactttagcgtctgagttatcgcatttggttatgagattactctcgttattaatttgctttcctgggtcatttttttcttgcttaccgtcacattcttgatggtatagtcgaaaactgcaaaagcacatgacataaacaacataagcacaatcgtattaatatataagggttttatatctatggatcagacatattctctggagagtttcctcaaccatgtccaaaagcgcgacccgaatcaaaccgagttcgcgcaagccgttcgtgaagtaatgaccacactctggccttttcttgaacaaaatccaaaatatcgccagatgagtttactggagcgtctggttgaaccggagcgcgtgatccagtttcgcgtggtatgggttgatgatcgcaaccagatacaggtcaaccgtgcatggcgtgtgcagttcagctctgccatcggcccgtacaaaggcggtatgcgcttccatccgagtgttaacctttccattctcaaattcctcggctttgaacaaaccttcaaaaatgccctgactactctgccgatgggcggtggtaaaggcggcagcgatttcgatccgaaaggaaaaagcgaaggtgaagtgatgcgtttttgccaggcgctgatgactgaactgtatcgccacctgggcgcggataccgacgttccggcaggtgatatcggggttggtggtcgtgaagtcggctttatggcggggatgatgaaaaagctctccaacaataccgcctgcgtcttcaccggtaagggccttagttttggcggcagtcttattcgcccggaagctaccggctacggtctggtttatttcacagaagcaatgctaaaacgccacggtatgggttttgaagggatgcgcgtttccgtttctggctccggcaacgtcgcccagtacgctatcgaaaaagcgatggaatttggtgctcgtgtgatcactgcgagtgactccagcggcactgtagttgatgaaagcggattcacgaaagagaaactggcacgtcttatcgaaatcaaagccagccgcgatggtcgagtggcagattacgccaaagaatttggtctggtctatctcgaaggccaacagccgtggtctctaccggttgatatcgccctgccttgcgccacccagaatgaactggatgttgacgccgcgcatcagcttatcgctaatggcgttaaagccgtcgccgaaggggcaaatatgccgaccaccatcgaagcgactgaactgttccagcaggcaggcgtactatttgcaccgggtaaagcggctaatgctggtggcgtcgctacaagcggcctggaaatggcacaaaacgctgcgcgcctgggctggaaagccgagaaagttgacgcacgtttgcatcacatcatgctggatatccaccatgcctgtgttgagcatggtggtgaaggtgagcaaaccaactacgtgcagggcgcgaacattgccggttttgtgaaggttgccgatgcgatgctggcgcagggtgtgatttaagttgtaaatgcctgatggcgctacgcttatcaggcctacaaatgggcacaattcattgcagttacgctctaatgtaggccgggcaagcgcagcgcccccggcaaaatttcaggcgtttaactgtatttaacggaacttgctccccacggaacatttcttatgggccaacggcatttcttactgtagtgctcccaaaactgcttgtcgtaacgataacacgcttcaagttcagcatccgttaactttctgcgatagcagcagatatgccagtaaagaaatcccatttgactatttttttgataatcttcttcgctttcgaacaactcgtgcgcctttcgagaagcaagcattatataatgccaggccagttcttcttcaattgtcccgttttgaaaagctgtgctacttatgctgatcatccaacttaattccgccgcccatattagcttcgcgctggatttaccggagctatgattagcgcaatcagagatatagtcactgggaaaaacagcaaatttattcaacaaggcgataacctgctctggggcttcctccatgtttgctttaaaggtattggctccatggtcgccagaaagaaaatgctccattaaggcacaataactttcgctatcttcgataccccattgatcctctaaagactcgcgtcttttacttatgatatcgatgctgtcaaaaggaagcacatgatattggaaggtatctttgccaggttcaggctttcgcggccagaactccagcgtttcagaccattgcttatgatagaatcgataaggtgcgatcaattgtagcgcctgtaacttctcgatactgagcggctcaatacctttagcctgataataatgcagttgttctttttttgctttaaaaccggcccgaacaataagccccatcataattaatagataaagaaaagagcatcccgcggtaatcaggcctctttcattcaaaccgttggatgttatcgctgcgaacacaaacattacagcgacaacacatgttaaataaaacccccacttacaaagcagcatggccttattttctttaatcatccgttcaaaattactattaaatatttcccagccattaaaagaatacttctcgctcccaggatggttttgtaataaaacttttttcatcacattccctgttattacatactttagaggcgataattttatccatgcaaaaaaaatatccaacgaattttcttgatccgctggatatttcagaatatgactcgaatagcacgaaagattcactcgcttacgctatcgccccgcttccgacttcatctgctggcggactttttttcgcactacgtttacgcggtgcagcctttttcttatcagcactgccaccactgcccggagccacaatgccgcgaaactgccgcaccggcgtacgtttggcttgatcaataagctgatatagcgtccccaccagcggctgcataaagtcctgatagcgacactgcttttcgctgatttgcgtcagcacgctttcccagtgcgcggtcatgtccggtcgcgtcgccatctccggcaggctatggaatagcgcttttccggcgtcggtggagtggatatagcgcccttttttggtcaggaaaccacgcttgaacaacagttcaataatcccggcacgcgttgcctctgtccccagaccatcggtcgcacggaggatctttttcagatctttatcctgcacaaagcgcgcgatcccggtcatcgcgctaagcagtgttgcatcggtaaaatggcgcggcggctgggtttgccgctctaccacttcacctttttcacacagcaactcatcgcctttcgccaccacaggcagtggcgtgccgtcgttttcttcatcgcgctctttgctgcctaacagcgtgcgccagcctgcttcagcaagaaaacgcgctttagcgacaaatttgcctttggcaatgtccagttcgataacacacttgcggaacaccgcatccgggcagaattgcatcagatactgacgggcaatcaggttatagaccttcgcttcgttctccgtcaggttgatcgcagaactccgtgcggtcggaatgatggcgtggtgcgcatcgacctttttgtcatcccaacagcggttgcgtatatctggatctaccactggctgcggcaacagatccggtgcatgaacactgatggcattcatcaccgcgtggcgtccggcaaaatgttcttctggcaaatagcgacaatcagaacgcggataagtgattagcttgtgcgtttcgtacagtttctggcagatatcaagcacgttctgcgcactcagaccaaaacgttttgccgcttcaatctgcaacgcactaaggctaaaaggcagcggcgcggattcactttcccgtttatcgttatagctggtgacaatagccggttgaccactaatgcggttaaccacatgctccgccagtggacgatgtaacaagcgcccttcttcatcctggtacggttcacacgcttcgctcggttgccagatagcggtaaaccgctcatcggcaggtgtcacgatatgtgctttgacttcaaagaagtctttcgccacgaagttttcaatctcttcatcgcggcgcaccaccagcccaagcacgggcgtctgcacgcgtcccacggaaagtacgccctgataaccggcattgcgaccgagaatggtatacgcacgggtcatattgatgccgtacagccagtcggcacgcgctcgcgccagcgcagaaacgcacagcggtacaaactcactgttggaacgaagacggtcgatcgcccgctcaaccgcctgcgggttcaggtcgtttatcaagcaacgctgtacctgctggcgcttttccggtgccagttgcagatagtccagcacttcatccaccagcaattgcccttcacgatccgggtccccggcgtgaacgatttcgctggcttcatgcaggaaccgtttgatgacgttaagttgtttggtcacggagggtcggggctgtaattgccacttttccgggacaatcggcaaatccgcaagattccagcgcgcatagcggctgtcgtaggcgtctggctgcgcctgctcaagcaggtgaccgatacaccaggtcaccacctgaccattaccgcactcgataaagccatcgcctttccggtgcggtttgggcaggacatcagcaatggcgcgcgccagactcggtttttcggcaataaacaaccgcattgaattaacgaatctcaaccatggcacgaccgccgcgcgctggcaccagttcgccaattgccgtcagttcaatgccaaactcggcggctgtagctttgacctcattttctgcttccggcatgaccgccagcagcaaaccgccagaagtttgcggatcacacagcagatcgcgcacttcacgcggcatttcacccatcagatgaccgtagctggcaaagttacgttcagtgccgccaggtactgcgcccaacttaatgtactcttcaacaccggggagtttcgggatcgcttcatagtcgacgcgtgcctgcacaccagccccctgacacatttcgctcaagtggcccagcagaccaaagcccgtaacgtcggtcatcgcttttacgccttcgatgttggcaaaggacgcgcctgcgatgttcatccggcacatcacttccgtcgccagtccctgatgttctggtttcaacagactttttttctcagccgtggtaagaacgccgatccccagcggtttcgtcaggaacagtttgcatccggcttgtgcggtactgtttttcttcacccgctcggtcggtacgatccccgttaccgccagaccaaaaatcggctccggcgcatcgatggagtgaccgccagccagcgcaatacccgcctgacgacatgcatagcgtccaccttcggtcacttcgcgggcaatttctggggaaagtttgttaatcggccagccgaggatcgcaatcgccataatcggtttgccccccatcgcgaagatatcgctgatggcgttagtcgccgcaatgcggccaaaatcgaaaggattatcaacgatcggcataaagaagtcggtggtactgataacgctggtgccattgcccagatcgtacaccgccgcatcgtcgcgggtttcattacccacaagcaaattcggatcaacaaacttcgcctgctcactatgcaggatggtttccaacacttttggggaaattttacagccgcaaccagctccgtggctgtattgggtcaaacgaatgctgttctcgctcatggacatctcctgtcaatgcaatccgggtatggtaaccctcattccgtgaagtgataagtgagagtgtctgaattcctgcgcctttgctcacaatccagacagtttcgcgacaattatcagaaataagttacaaacggcgtcgggtccgggacgttaatgctcgtagatgctttcagctgcggcgtaccgaggtagagaaaaccgacaattttatcctgctcacggcaaccgaatgcttcacgcactaccggactttcagttaatgcgccactgcgccagatgccgccaaacccctgggcaactgctgccatttgcatcgccatgaccgcgcatccggcagacatttcctgttcccagcgcgggactttatgattctcttcgcatttcgccaccaccgtgatgatgagcggtgcgcggaacggcgcattacgggctttgtcgatagctttgtcatcactaccggcagcaatcgccccctgttccagtacggcgctgaaacgctcgcgcccttccccttcaatcacaaaaaaatgccacggttgcatggacttatggtccggcgcacgcatacccgcacgcaggatgttttgcagttgttcacccgttggcgcgggttcagccaagcgggaggcgctacggcgattgatcaatagttcgagtgcatccatttgattaactcctgtcgtgatatttattcacaaaattaacacgagagtggattttgttacagcacagtccgcaattcctgctgacaagtaccggttgggtcattacgataaccacatctattgcgcctgtgacaggtgtgaccttaagttgggagaatacatgcgaaccctttggcgatttattgccggattttttaaatggacgtggcgtctgctgaatttcgtccgtgaaatggtacttaacctgttctttattttcctcgtactggttggtgtggggatttggatgcaggtcagtggtggtgatagcaaagaaacggccagtcgtggcgcactgctgctggacatttctggtgtgatcgtcgataaacccgacagttctcagcggtttagtaaattaagccgccagctgcttggtgccagttccgatcgtctgcaggaaaacagtctgtttgatatcgtcaacactattcgccaggcgaaggacgaccgcaatatcaccggtattgtgatggatctgaaaaacttcgcaggcggcgaccaaccgtctatgcagtacatcggcaaagctctgaaagagtttcgtgacagcgggaaaccggtttatgccgttggcgagaactacagccaggggcaatattatctcgccagtttcgccaataaaatttggctgtctccgcaaggcgtggttgatctgcacggctttgccaccaacggtctgtactacaaaagcttgctggataagctgaaagtttccacccatgtgttccgcgtgggtacgtataaatctgccgttgaaccgtttattcgtgatgatatgagtccggcagcccgcgaagctgacagccgctggattggtgagctgtggcaaaactatctgaatactgttgccgctaaccggcagatccctgctgagcaggtattccctggcgcgcaagggttgcttgagggtttaaccaaaaccggtggcgataccgcgaaatatgcactggaaaacaagctggtcgatgcactggcaagcagtgcggaaatcgaaaaagcactgaccaaagaattcggctggagtaagactgataaaaattatcgcgccatcagttattacgattacgcattgaaaacgccggcagataccggtgacagcatcggtgtcgtctttgctaatggcgcaattatggatggcgaggaaactcaggggaatgttggcggtgataccactgcggcacaaatccgcgacgctcgccttgacccgaaagtgaaagcgattgtcctgcgtgttaatagcccaggcggcagcgttaccgcgtctgaagtgattcgcgctgaactggcagcagcccgggcagcgggtaagcctgtggttgtaagcatgggcggcatggcggcatctggtggttactggatttccacgccagctaattacattgtggctaaccccagcaccctgaccggttctatcggtatcttcggcgtgatcaccaccgtagaaaatagtctggatagcattggtgttcatactgatggtgtcagtactagtccgctggcggatgtttctatcaccagggcactgccgccggaagcgcagctgatgatgcagttaagcattgagaatggctataaacgctttatcacgctggttgctgatgcgcgtcatagcacgccggagcagattgataaaattgcccagggccacgtctggaccggtcaggatgcaaaagctaacgggctggtcgatagtctcggggatttcgatgatgcggtcgccaaagcagcagagctggcaaaagtgaaacagtggcatctggaatattacgttgatgaaccgaccttcttcgacaaagtgatggacaacatgtctggttctgtccgggcaatgttgccagatgcgttccaggccatgttacctgcaccgctggccagcgtagcctctaccgttaaaagtgaaagtgacaagctggccgcgtttaatgacccacaaaaccgttatgcgttttgcctgacctgcgccaacatgcgttaagtcttgtactgagtggccgacagatcgtcggccacattattttttacgtcgacgaatcctcttcccgctgtttcgccccatatttccttatccgcatagtatcaggtgcgctccccctgcctcacgtatatacttttgctctttcgatatcattcatatcaatatcatgcaaaagaaaagtatttacgttgcctacacgggcgggaccatcgggatgcagcgttccgagcagggttatataccggtgagtggtcatctacaacgccaactggcgctgatgccggaattccatcgcccggagatgccagatttcaccattcatgaatatacgccgctgatggattctagtgatatgacgccggaagactggcagcatattgctgaagatattaaagcgcactatgacgactatgatggttttgtcattctgcacggcaccgacacgatggcgtataccgcctctgcgctgagcttcatgctcgagaatctcggtaaaccggtcattgtgacagggagtcaaatcccgctggctgagttacgctctgacggacaaattaatctgctgaatgcgttgtacgttgcggcgaattatccgatcaacgaagtaacgctctttttcaataaccgattgtatcgcggcaaccgcactaccaaagcccatgccgatggttttgatgcgtttgcctctccaaaccttcctccgttactggaagcaggtatccatattcgtcgtttgaatacgccacccgccccgcacggtgaaggggaattaatcgttcatccaatcaccccacaaccaattggcgtagtgacgatttatccagggatttctgctgacgtcgtgcgcaattttctgcgccaaccggtgaaagcattgattctgcgctcctatggcgtgggtaatgcgccacaaaacaaagccttcctgcaggaattacaagaagccagcgatcgcggtattgtggtggtcaacctgacacaatgtatgtccggtaaagtgaacatgggtggttatgccaccggtaacgccctcgcccatgccggcgtaattggcggtgcagatatgactgtagaagccacgctaaccaaactgcattacctgcttagccaggaactggatactgaaaccattcgcaaggccatgagccaaaacctgcgcggcgaactgacgccggatgattaaggagactgtaatgccccctcgcgccctgttactggtcgatttacaaaatgatttctgtgctggtggcgcgctcgccgtgccggaaggtgacagtacggtggatgtcgctaaccgcctgattgactggtgccagagccgcggtgaagcggttatcgccagtcaggactggcacccggcgaatcacggcagttttgccagtcagcacggtgtagagccttatacgccaggccaactcgacggtttgccacaaaccttctggccagatcactgtgtgcagaacagtgaaggcgcacaattacatccgttactgcaccaaaaagcgatcgcagcggtgttccataaaggcgaaaatcctttagttgacagttacagtgccttttttgataacggccgtcggcagaaaacctctctcgatgactggttacgcgatcatgaaatcgatgaattgatcgttatgggcctggctactgactattgcgtgaagtttaccgtgctggacgcgttacagttaggttataaggtaaacgtgattaccgatggttgtcgtggcgtgaatatccagccccaggacagtgcgcacgcgtttatggagatgagtgcagctggggcaacgctatatacgctggcagactgggaagagacacaggggtaattttacgctggcctacaattctgtactggcattgtaggccaaataaaacacgtcagtggcacatctggcaattgatgccatcaacgaaagatttaattcacctcagaaatctcttccaagctcaccttccgcgtttcgatgccaaaaatggagagaaccagcgcacagagcaataacataacaccaagtaccataaacaccgtgatgctcccataatgtgttaataatgccgcaacgccatagggcgtgaagactgcgacgatccgtccgacggcattaacgaaaccgctaccgcgcaggcgtaaatgcgttggccaaagctccgggatataaaccgcgctcgcgaagcaaacatacatgtataaaaagaagatcatcaccagtccatagattaaaatcgcccactctgtagtctgaatactatagatatagcctaacacggcaataataataagtaaggtggagccaaataaccgacgaggaaaatgatcaataattaatgccgcaataaatattcctaccggagcgccaatcataataacagcggtcattaatatacttttatcgacatcaatgccggagttaacaaatatggtcggtatccatacggtgatggtataaaggctaatgttcattgcaattaaaacagtaatcgcgactaatgtacgtcgtaacatttcacctttaaacaggagccagaaagtacccttgattactttaaccttgctgttgctctgatagctagtaagcgggggtaaacgaatactcttctctctttcaatttgctgctctacttcacgaagttggcattctgcacctgcgatttgccctttccctgccagccatcgtgggctctcgataaagtatttaccactgagaaaccaggctaacagtatgccaataccacccagcagaaacattattcgccaactaaaaaaagcgataaccaccacgcctatcgccgcagacagcatggggctccagttaccaacaaaactgagccgcgcggaccattttccacgcaccgtcgcggggataaactccgtaaaactggcatagccaaccataatcagcgcccccattcctgttcccatcaggaagcgaaagaagatgagccagtacatatcagggacaaaagcggcccctgttgcagcaataccgacgatgagaagatttatgcgaaacgccctgcgccgcccaaagtagtcaccaataaacccaccagtaagactgccgatgaaataaccaaacattaatgcgctggtaaaggcggcattgaggaaattattactccatccattgcttaccagctttgctaagacgacattaccggagtaactcaaaaaccctgttaataacagactaaagcttataataccaaatatacgataatgaaaccgggccaaaggcaagcggtccagtcttgcgccaatttgatcatattgttccattaggtgcctcggatttgctaaaaaggtagcaattgcggcaaattcacttgccgcatctttatcatcattttatttcaaggcgcaggaacaaataatattgacaacgtgtgcttaaattaccacaccagctggatattattgtctttgcaaaatgctatccactctgcacccggacttttatcagttattatgtaattaatatgactaaaatcagctaactggacaaaagctttgcgatcaaacttagagtgatcaaccaataacgcaacttctgtcgcctgacggatcattgtctttttgatttcagcttccgcttcattagagtccagcgcgccgctgttaatatcaagacctttacaactcattaccatgatatcgacatgatagcgcctgatgatctctttagtaattcttccttgcagactaagtgtatttttgtttagttccccacccgtactaacgactttaatttcactctgagccagaacatgaatcgcttccgcgctgttggttagcaacgtcaggccactacggtcctgtaacaatttgagcaattccattacggtactactggaatcggctgccatggtggttttattgtcgataaagggtagtgccttgcgtgcaataagctgcttctcttcataaaagctactagcgcgcttataaaaatggatattctccgtcaacatcgctgtatttaaaacagcaccaccataggttctggtcaaaaagccttcatcttccagcttctcaagatcgcggcgaatggtttcttcggttacctgaaaaatcccactcaaattactgactgtcacctttttatcgttggcaaccatttgcttaattgcctgaatcctgtcttttgccgccacgattacacccctgtatctttttacatcacattagcgcgattatcgcataaccgatgtttactttcaaaataacctgtttgaatcacagattttcatcacagttttcacagaaacagaggtgaatcgtgttgagtatttaacgctccagggcctctgccatttccctcatcaatgttgcgtctgcatcgcttaagttgatattcagtgccgcgacattttcgcgtacctgttccggtgcagtagccccactaagaatggagattaaatcactctgttttaatatccacgccagtgccagagtgggaattgtgcactgataacgagcacaaagtggctgccactgttcaagcatatcaatcactttcagcatgttttcacgctggaaccagactttatttgcccgagcgccgcccggaacgtaatcacgagtgatggtgccggtcaacaatccctgctctagcggggaataaacctgaaccacaatgccattatcacgacatagtggcagcagttcgttttccattgcccggtcgaggatactgtatttcgcctgaataatatccagttcaccatattgcagatactcgcggatatggtcagcatcgacgttagcagcgcctatagcgcgaattttcccttcagactttaactcattaagcactgcgacagtttcagcgatcggcgtaaaaaatggcggcacgctctgccagtgcgtcatgtagatatcgatgtaatcaatacccagacgttgcaagctcgctgctacctcttcgcggatagattccggggaaaggtttttatacaactgccgatcgccaactttgttgaataaacttccttttcgttcccagacaatgccgcatttggtttctactacaacctgttcacggggcagtttttttaacgcctgaccgacgataacttcactattgccaaagttatatcctggcgcagtatcaatcagattaatgccacaacgatgggcttcaagaatcgtatcaatacatatttgccgatcgagatcgccattccatgcaggaccgccgccaatggcccatgtccccaaccccattcggctaagcgtaatatccgttgtgcctaaaggtatctttttcatttgccttcattatccttcgtattcttccagcaattgttcgaccagctttctgttttttacgccggtggtggcaccgacgcttagaacgctgatagccgccgttgcattggcaaagcgtgcgcattcacgcagatttttgccttctaacagtgccgcaataaaaccactagcaaagttatcgcccgcgccaatggtgtcgatggcggttattcctgcgaccgccggcaccttcatcgtcatgtcaccacgcttgataaagcagccgtctttacccgttttaatcaccaccgtttttacgccgcacgcaagaaagcagtcagcaatttcatccagtgtctctttcccggtgagtaattttgcctcggcaaaattaggaaacagataatcgacataactcaatgcttcgcaaatatcatccagcgtttcattcaaccgcggtttgatcatatcggcacagataatcatctgccgggctttagcttgcgtaaaaatttctgttagcgctttaccatccaatagtggactgttgaaaatactggccagacttaataatttcgcctgagaaaaccgcgcaaaatcaacatcgtcaatattcaatttccacagactgccattacggtttgtgacaaacgtccgctcgccatcctccgtcaccagtccaacgttaatagaggtatctatgctgacgtcctgcttcaggctttgaatatcaatattctctttgcggcaatggtcgagaataaattgccctgcggcatctttaccaatacgactcattaatgctgtgcgatggcccagacgagaaataattgttgcttcatttattgcatcacccccggtggtcattgcgattctttcaagaggataagaatccacatcaaagatatttttactgaccggttgcaatggaatatcaacaatagcggcacctatacaaataacgtcgagattatccatatcattattccgctttgccatcagaaccgaacagtttaattttttccaatgcccgttcttttacagctttacgtacttcacgttctaaatgcaggaaaggctgatcctggttttctttcactgcaaccattgcggcctgacagagctccgtatgaatgttgattttcgcgatacccaagctaattgcagttttaatgtcggcatcactgatcccgcttgcaccgtgcaaaaccagcggaacagaaacggcatcgcgtacgcgtttgacgacctcaaagttcaattgtggctcactcgtataaaccccatgctggttgccgatggcgacagccaaactatcacagcccgtacgttcaacaaattcagccgcctggtcaggatcggtatagtgatagcccgccagcgcttcctcataaacggtttcattaccgacatgccctaattccgcctctaccggaatacccagcggatggaagaaatcgacagcctctttggttaaacgaatattttcttcgaaatcaaacgcggaagcatcacgcattaaactattcataccatgagtccaggcgttatgaataatctccatactccgaccatgatcccaatgagttattaccggcaccgttgctttttgtgccatacttaccatcatgtgagagaaatcttcaaaactggtgttaccgacaaaacctgtaccaaaagaaataataaccggggatttcgcttcttcggctgcgtcgataacgcccatcaacatttctgcattccatacgttaaaatgggcaattgcataatgtttatttgtggcatcgttttcccaatatctgatatctgcgagcatgttctgttctcccgtattaattaatcgctaattttaataacgcctttaataatgtcgcgtttgttgttaacactctcttcaaatgcctgttgtacatcccgataatcgtaaatatgcgtcaccatgcttttcacatcgaatcgcccactagaaatagcttcaatcgtgaccggataacgattggcatagcggaataccgtctggatagtgacttcgcgattgattttgaggaaattgattgcgctatcgccgggtacagtaccaacaatcataattttaccgccgcgcattaccagataaggtgcctgtttaacggtgaccgcagaacccgctgtttcgaaaacaatatctgcgcccatgtcttcggtaaattgctgacagcgtgcaatagtgtcttcttttgcgccgttaataaccactgtcgcaccaagctgttccgccattgccagacgtttttccagcacatcaacgacggcaatttccgttgctcccaggcatttgcacgcttgcaacgtcatcaaaccaatacaacctgctcccagaataattatcttcttacccggtttaacatctgccagcatcgcggcatgcatcccgactgcggcaggctccaccagcgccccttccatcgtgtccatattgtcgggcagtttgtaagtaaagctctccggatgacacagatagtgcgttaatgcgccgcggtagttgggttgtgtcgccataaaatcaacgtccgggcagatgttatatttgccttccagacagtaacgacagtgaccgcaaggaacgccaggttcgatatttacccgatcccccggtttaaatttgcgcacgcggcttcccacagccacaaccgtcccggcgcattcatgacccaggccaatttcttgatttgggtctttaggcggaataaacgggccactttcaaaaccatgtacatcactaccacaaataccgacatattctactttaatcaaaacttcatcttctttaggcactggtatttctgcactaataattttcattgtgcccggcacctgcaatattgctttactatttttcattttgaatccacccgtattatttattggctactgcatcaatacttaaactttcaacggagacacctttggtttcgattccaatggtggcgatagcaattgcgacaataatactaaccgcccccagaagaataaagactcccgtaacgccataactactgagcagcactgcaacggcataaggtgcggcaataccactgattcgccctaccgcattcgccagaccggagccacggagtttggcctctgtcggccagatttcagggacatacactgcgctggcatagcaagcgtacatatagacgaaagtaatcaggaagaaaccaatcaacgttatgagcaacatactggtttgcagactatagatatatccgagcaccgcaatcaggattaatagccccacacccattgttttacgcggaattttatccatcaccagcatggcaataaaaataccaaatggcgcgccaaacatactcatggtatttaaaacaatgctgtcttttaaattaatcccctgggtcatgaatattgttggcaaccagttaattagtgtgtactgcacaacgttcatggcaatcagcacacaagagcctaatatcacgcgtttcagtaatactcctgtcagtaaggcactatacggcaccgcttgtggcgctttaccgtcatcagcaataaccacaggcggcaaaggtttacccgtctggcgtatgacgccttcttctatactccgcatgactttctcggcttcctgataccgtccgcggctttccagccagcgcggggattcaggaaagtagcgccaggccagcgccgtagcgataaggctcaatattgcagggataagcagttgtacccgccagttccactctgcactaatcagcggcgtgagtcccatcgctatcaaactacagagcggataactccagttgccaataaaggaaacccgactactccacgttccacgatttctaccgggcatatattcggtgaaaccagcaaacagcgtaaccagtaaagctcccagcccaactcccatcacaaaacggcaggcaataaggaaatccatattcggactgaaagcaccgacaaccatgctggcaatatgaatggcctcatagaggatgaacgcatttctgcgaccggttttgtcgccaatgatgccgcccaccagcgcaccgagaaacattccggcggtcgtgattgcactgaatgtggctgtggtggaattatctgtccagcccaacgctttcagctgcgcgaggatcaagccaccaacggcattactccagcagacaagcaagccaaacgcgacgatggcaaacatactactatgccagcggcaatccggtaagcgatccagccgtgcaccacaatgcggttttgttatctgttccatgcgataacgttccttcaggagagtggttattcatcaaagtcgtaagtcatgatcactttgattgcggttttatcgaccatcgcatcaaacccttcgcgccattggctcaggccgatacgatgcgtgatcatcggtttgactttgatagcgccgctggctaatagcctgatagcgttacgccaactggtggagtcataggccatatgcccaatgatgcttttgttccaggcggtaatgtcattaatgctgaaatcaagaggtttgaagcccattccaacgcgtaccacttccccgttcgggcggagcatttcgatggcttgtttcagtgcgatattggcaccggagcattcaatcaccagtcccagattgtctttgccacaaatttgctggcagcgcgccaccacatcttcggtagaaccatttactactgccgtcgcacccagttcttttgcaaccgggaagcggaccgccacatcttcttgcagaccaacgacgacgatatttaccgcccccataattcgcgccatttgtacggagaacagcccgagtgggccagtgccgatgacgaccacatcctgaccaggaaggaatttgctttgctgcgcgatggatttgtaggcattacagatagggtcaagtacggctgcgtcctcataatcaacaccatcagggatttcccacaacgcatgacgatgaattttgagaatttcaccaggaaccagacaatatttggaaaaaccaccgccccaggtattattatccagaccaaggtttactttttctgtacaacacagaaaatcaccttgttcacaggccggacaaacaccgcaaacgtgaccgctgttatcgcttacgacgcgttgccccactttccagtctttgactttttcaccaacctgcgcaatacaacctgcgaactcatggccgcggatagagttaaactcatcagaaccgctatcgacattgtagtgcttcatgtctgcgccgcagattgccgcggctttaatttcaatcactacatcttccgggccacacatgggttgtgggacatcaatcatcttgtagccgccaaaggccttgccaaaccgagccagtgctttcattgcgtcatcctctgtgtttagttttgcttagatggccatcatacttacccacatgatttttgaggtcaacattaaatctgtaaaacacagataatgatctgcgttttacaactcagatcacaattacgcagaaaatggctgggtctgttacaggttgatggaaggcggggcgcaaaaagagcaaattcgagagggattaccggccaaataggtctgagacttaagttcaggagaagtcattcaggtgtgaacgggacggcaagagatcggactgggacttagccaggtcatggcgagataattgagatgagtcgtggggtcattgttggctatccccttcatagccgaggcaaaaaggggatgaaccacttacttaaacatggcaataggctttgcactgataccaaaatcttcttttaactgctgtttgctcttcatgaccatctgaccatttgtgtcaattgtcatatgctgtgcttcgatattatggcgggcttgccacagcatcaccagttgcaggcagttctctttttgttcctcggtcaacgcaacgccatcaggccatttccccagttcaacggcggtgctcaaacgctggtatacctcaggcatcatgctgttgataatgtcatcaagattcataatttttccgctcctgtggaataagttgctgaatcgttttttcaaccgttgatttcttcgccgttttcgccatcggtaaagcgtaaagaggcagagttaacacaataacgttcgcccgttggctgcggcccgtcggggaagacatgccccagatgggcatcacagttaccgcaacgaatttctatgcgctgcattccatgactcaagtctttgatataacgaatggattcttcacttaccggttcgtagaaactgggccagccacagccggaatcatacttggtttgggaatgaaacagcggggcatcgcagatcaaacagtgatatacgccgtcacgcttgttatgcagtaaacgacccgtaaatggcggctctgtcccatgattctgcgtcacgtaaaactgcatctcggacaaattttttttcagttcttctgcgctaggtttattagccatttgctcacatctcactttaatcgtgctcacattacgtgactgattctaacaaaacattaacaccaactggcaaaattttgtcctaaacttgatctcgacgaaatggctgcacctaaatcgtgatgaaaatcacatttttatcgtaattgccctttaaaattcggggcgccgaccccatgtggtctcaagcccaaaggaagagtgaggcgagtcagtcgcgtaatgcttaggcacaggattgatttgtcgcaatgattgacacgattccgcttgacgctgcgtaaggtttttgtaattttacaggcaaccttttattcactaacaaatagctggtggaatatatgactatcaaagtaggtatcaacggttttggccgtatcggtcgcattgttttccgtgctgctcagaaacgttctgacatcgagatcgttgcaatcaacgacctgttagacgctgattacatggcatacatgctgaaatatgactccactcacggccgtttcgacggtaccgttgaagtgaaagacggtcatctgatcgttaacggtaaaaaaatccgtgttaccgctgaacgtgatccggctaacctgaaatgggacgaagttggtgttgacgttgtcgctgaagcaactggtctgttcctgactgacgaaactgctcgtaaacacatcaccgctggtgcgaagaaagtggttatgactggtccgtctaaagacaacactccgatgttcgttaaaggcgctaacttcgacaaatatgctggccaggacatcgtttccaacgcttcctgcaccaccaactgcctggctccgctggctaaagttatcaacgataacttcggcatcatcgaaggtctgatgaccaccgttcacgctactaccgctactcagaaaaccgttgatggcccgtctcacaaagactggcgcggcggccgcggcgcttcccagaacatcatcccgtcctctaccggtgctgctaaagctgtaggtaaagtactgccagaactgaatggcaaactgactggtatggcgttccgcgttccgaccccgaacgtatctgtagttgacctgaccgttcgtctggaaaaagctgcaacttacgagcagatcaaagctgccgttaaagctgctgctgaaggcgaaatgaaaggcgttctgggctacaccgaagatgacgtagtatctaccgatttcaacggcgaagtttgcacttccgtgttcgatgctaaagctggtatcgctctgaacgacaacttcgtgaaactggtatcctggtacgacaacgaaaccggttactccaacaaagttctggacctgatcgctcacatctccaaataagttgagatgacactgtgatctaaaaagagcgacttcggtcgctcttttttttacctgataaaatgaagttaaaggactgcgtcatgattaagaaaatttttgcccttccggtcatcgaacaaatctcccctgtcctctcccgtcgtaaactggatgaactggacctcattgtggtcgatcatccccaggtaaaagcctcttttgcattacagggcgcacaccttctcagctggaaacctgcgggtgaagaagaagttctgtggttgagcaacaacacaccgttcaaaaatggcgtcgctattcgcggtggcgtaccggtttgctggccgtggtttggtccggcggcacaacaaggtctgcctgcgcacggttttgcccgcaacctgccgtggacgctgaaaagtcatcatgaagatgctgatggcgtagcgctgacttttgaattgacgcaaagcgaagagacgaaaaaattctggccgcacgactttacgctgttagcgcatttccgcgtgggtaaaacttgtgaaatcgatcttgaaagtcatggcgaatttgaaaccacctctgccctgcatacctactttaacgtgggtgatatcgctaaggtaagcgtcagtgggctgggcgatcgcttcattgataaagtgaatgacgcgaaagaaaatgtactgaccgatggtattcagaccttccctgaccgtaccgatcgcgtgtatctgaatccacaagattgcagcgtgattaatgatgaagcgctgaatcgtattatcgccgtaggccaccagcatcatctgaacgttgtcggctggaacccgggaccggcgcttagtattagcatgggcgatatgccggatgatggctacaaaacatttgtttgtgtagaaacggcttacgctagtgaaacgcaaaaagtgaccaaagagaaacctgcacatctggcgcaatccattcgcgttgcgaaacgttaatttacgttaatgttgtgtgccgggtgcaatgcatccggcacacaacatcacaccatatccagcgcagtttttccttttggtgccggatatgccttatccagcatagctaattccgcactagaaagttcgacctcaagcacagccgcattttgttggacatgggcaatcgtggccgcttttggaatcgccatcacaccctgatgactgatcacccacgccaacaatacttgtgccgcgctgatattgtgagcatgtgcaatttcgttgactaccgcgttttttaacagtccattgcgcaaccgcccggcctgggctaacggactgtaagccatcaccggcatctgctgttgctggcaccaggggagtagatcgtactcaattcctcgactaccgagatggtaaagcacctgattagtggcacactgatttccccccggcagctgccagagttcctgcatatcagcataatcaaggttagaaacgccccagcggcggatttttccctgggcgatcaatttttccatcgctgcgacagtctcttcaaaagcgaaactgccagaccagtgtaataagtaaagatcgagataatcagtattgagacggcgtaaactggcttcgcatgcatttatcgctttttgcccgccagcattccacggatagactttagagacgagaaagaccttctctcgcagaccggttaatgcttccccaaccaccttttcggcaccgccatcggcatacatttcggcggtatcaatgagggttaaaccgagttcaatgcccgcgcgtagtgcagcaacttctgttttgcgctgactggcatcttcgcccatataccatgttccctgccctacggctggcagactgacatcgccactaaattgaatcattttttgttgcattgtttcctcccaggtattgcaccaccgtaatgcaaaacagggcgtgacgccctgtttttatgcacaaaatgccctggaaagatgcattatcagaatttgtaggtgatcccggtagaaatcaggccagtccaggatttatccaccatcgggctgtcagtaacttcatcagacagacgggtgtagcgtgcggtaccgtaaacactccagtcgccgaggaagttgtagctggcgctcagctccaggtaagggctccagctgtcgttcgggttatagccacgcagaccgctgcgagcggactctttgcggcttacgccataatagtattcgttctggttttcgctgttccactgcacaccaatacccggagtcacggtcaggccaccgttggtgtaacgatacaaccaggccatatcccagacgatgccgttgctgttatccagggtatcgccagccagggtggtacgcaggtaaccgtactgggtaaagtgagcataagacagaccagccatcatggtgctcttacggtcatccaggtgacgcatttggtgatcgccactgtctttcgctttgaagtaaagcgggctccagtaagcggtaatactaagtttatccgttgcgtcattccacaggtagtaaccaccacctaagccacggaaccagaagttatcgccttcatagttgattaccggtactgggtaaacatcggtatcgtaatctttatatgggtgttcaacgacacctacgcctgcgcccagggaaaatttaccttcagcgtgcgctacgcctgcagacgttgcgataagcactccaagtgccagaagtttgagtttggtcacaattaatcattccttaaacaaatgtttagcgggcgacaaagtttacccgtcaatacatcgaaacccaacctttttacgttttcattttttaaagtaactgtttaattttcctgacgcggatgacaccgcgcttacagccaaatgaatttagcgttactggcgagcctggtctttacattaattatgcaaaatttatggatgagttgttgatatgccattgaaattaagaaagccgtgcaggcaagttttccatttgccatctacgcttaattttgaaggtgtatcaccgggcacgttgttctcatcgtcgataaaatggcatgagagttgctgtgttttagcaagagacgtcgttcagtttacctcttccgggagcctctactattcatatgaacggctcttaacctgtgctaaaaaacgaaaggacggcataccatgaatatattcgatcactatcgccagcgatatgaagctgccaaggacgaagagttcacactgcaggagtttcttaccacttgtcggcaagatcgcagtgcttatgccaacgcggctgagcggctattgatggctatcggtgagcctgtcatggtcgatacagcccaggaacccagactttctcgactcttttctaaccgggtcattgcacgttatccggcgtttgaagagttttacggcatggaagacgcgattgaacagattgtctcttatctgaaacacgcggctcaggggctggaagagaagaaacaaatcctgtatctgctggggcctgtgggtgggggtaaaagtagccttgctgagcgactgaaaagtttaatgcagctcgtaccgatttatgtattgagcgcgaacggtgagcgtagcccggtcaacgatcatccgttctgtcttttcaatccgcaggaagatgcgcagattctggaaaaagagtatggcattcctcgccgttatctcggcaccatcatgagcccgtgggcggcaaaacgcctgcatgaatttggtggcgatatcactaagttccgggtagtgaaggtctggccgagtattctgcaacaaattgctatcgccaaaacggaacccggcgatgagaacaaccaggacatctccgcgctggttgggaaagtcgatattcgtaaactcgaacactacgcgcagaatgacccggacgcctacggctattccggtgcgctgtgccgcgccaatcaggggatcatggaattcgttgagatgtttaaagcaccgattaaagtgctgcatcccttgttaaccgccactcaggaaggtaactacaacgggacggaaggtatctccgccctgccgttcaacgggattattctcgcacacagcaacgagtccgaatgggtcactttccgtaataacaaaaacaacgaagccttcctcgatcgtgtttacatcgtgaaggtgccgtattgcttgcgcatttccgaagagatcaaaatctacgagaaattgcttaatcacagtgaattgactcacgccccatgcgcccctggcacgctcgaaacactgagtcgtttttccattcttagccgcctgaaagagccagaaaactccagcatttatagtaagatgcgggtttatgatggcgaaagtctgaaagacaccgatcccaaagccaagagctatcaggaatatcgtgactacgccggtgtcgatgaagggatgaacggtctgagcacgcgttttgcgtttaagatcctctcccgcgtgttcaacttcgatcatgtagaagtggcagcaaacccggtccatctgttctacgtcctggaacagcagattgagcgcgagcagttcccacaagagcaggcagaacgctatctggagttcctgaaaggttatctgatcccgaaatatgccgagtttatcggcaaagagatccagacggcctaccttgaatcctattccgaatatgggcaaaacattttcgaccgttatgttacctacgcggatttctggattcaggatcaggagtatcgcgatccggataccgggcagctgtttgaccgcgagtctcttaacgccgagctggagaaaatcgagaaaccggcggggatcagtaatccaaaagatttccgcaacgagattgttaacttcgtactgcgcgccagagcgaataacagcggacgcaatccgaactggaccagctatgaaaaactgcgcacggtcatcgagaagaaaatgttctccaataccgaggagctgttgccggttatcagctttaacgccaaaacgagtaccgacgagcagaagaaacacgacgactttgtcgaccgtatgatggaaaaaggctacacccgtaaacaggtgcgtttactgtgcgaatggtatttgcgcgtacgtaaaagctcttaacaaccctggcccggtacacatgttaccgggcctacaacgacagcgaaccgtgggcctgagaagcggcaacacaggcgtagcatacagttggcaaatgtagtacggggggcatatgacctggtttattgaccggcgtctgaacggcaaaaacaaaagcatggtgaatcgccagcgttttttacgccgttataaagcgcaaattaaacagagcatctccgaggccattaataagcgtagcgtgactgacgtcgacagcggcgaatccgtatccattcccacggaagatattagcgaaccgatgtttcatcaggggcgtggcggtctgcgccaccgcgtgcatccgggcaatgaccatttcgtccagaacgaccgaattgaacgtccccagggtggcggcggaggttccggcagtggtcagggccaggccagccaggatggtaaaggtcaggatgaatttgtctttcagattagcaaagatgagtatcttgatctgctctttgaagatttggccttaccgaatctgaaacaaaaccaacaacgccagctgaccgaatataaaacgcatcgggcgggttataccgctaacggcgttccggccaatatcagcgttgtgcgtagtttgcagaacagtctggcgcgacgcacagccatgacggcaggcaagcggcgggaacttcatgcactggaagagaatttggccatcatcagcaacagtgaacctgcgcaactgctggaagaggaacgtctgcgcaaagaaattgcagaattacgtgccaaaattgaacgcgtcccttttattgacaccttcgatttacgttacaagaactacgagaagcggcccgatccctccagccaggcagtgatgttttgcctgatggacgtttccggtagtatggatcaatccactaaagatatggctaagcgtttttatattctgctgtatctgttcctcagcagaacgtataagaacgtggaagtcgtatacatccgccatcatacccaggcgaaagaagtcgatgaacatgagtttttctacagccaggaaacaggcggcaccattgtttccagcgccctgaaactgatggatgaggtagtgaaagagcgttataacccggcacagtggaatatttacgctgcacaagcaagcgacggcgataactgggccgatgactctccgctttgccatgaaatcctggcgaaaaaattattacctgttgttcgttattacagctatatcgaaattacccgtcgtgcacatcagacattgtggcgagaatatgagcatctgcaatctactttcgacaactttgcgatgcagcacatccgcgaccaggatgatatttatccggtgttccgtgaactgtttcataaacaaaatgcaacagctaaaggctaaaactatcagccaggtcattatcgcctggctgatttttagcttactgtaaattatctcatttattacatacattagcttacaatcgctttaaatatgacagcataacctttacataatttagttccagaaaacaatcattcggaaaaatgattcagagtacacgtatttccatggggttattctttaaatattttttaagcttaacgaaaattgatcctggtcaaaactatatatctctgccaagtataaaatccagcactcacattgctctcctttttatggtttctatgggtacacaaaaattaaaagctcaaagcttttttattttcagtttattgctgacgttaattttattttgcattactaccttatataacgaaaacacaaatgtaaaactcatcccacagatgaattacctgatggttgttgtggctttgtttttccttaacgccgtcatttttcttttcatgttaatgaaatatttcactaacaaacaaattttaccaacactcattttaagccttgcatttttaagtggccttatctatttagttgaaaccattgtaattatccataaaccaattaacggcagtacactgatccagacaaagagcaatgatgtttctattttctatattttccgccaactcagttttatttgtttaaccagcctggcgctcttttgttatggaaaagacaacatccttgacaacaataagaaaaaaacgggaatcctgttgctggcgctgatcccttttttagtttttccccttctggcacacaatctgagcagttataacgctgactattctttgtatgtcgtcgattactgtccggacaaccatactgcgacctggggaatcaactatacaaaaatattggtttgtctgtgggcatttttactgttctttattatcatgcgcacacgattagccagcgaactatggccgttaatagcattattatgtctggcaagcctatgctgcaacttacttctactgactctggatgagtataattatactatctggtatatcagtcgcgggattgaagtttccagtaaactgtttgttgtgtcttttctgatttataacattttcaggagctgcaactctccagcaaactggcagttcatgatgtgctgaccaatatttataatcggcgctactttttcaacagcgtagagagtttattgagccgacctgttgttaaggacttctgtgtcatgctggttgatattaatcagttcaaacgcatcaatgcccaatggggacatcgtgtgggtgataaagtgctggttagtattgtcgatattatccagcaaagcatccgccccgatgatattttagcgcgactggagggtgaggtgtttggcttgctatttaccgaactcaatagtgcccaggcaaaaatcattgcggaacgtatgcgtaaaaatgtcgaactcctgaccggctttagtaacagatatgatgttcctgaacaaatgaccatcagtattggcacggtttttagtacgggtgacacgcgtaatatcagccttgtcatgacggaagcagataaagccttacgcgaagcgaaaagcgaggggggcaacaaagtgattattcatcatatttaagtgcaaaaatattcagagccatgctttttgcgtggcttttgcatacaatttattactattacccctaaatttcccctccccagcggcgcagagatgagtataattagcgcccctgtgccaggccgcaatcgaactttatctggttttctcgtttcactaaccgaaggagatgcgtataaagcttccgatgagcgtttatatgtcaataagcagaacaaaaacagccgttcatgataaccttctgtggttgtttgcttgtaatctcaggagcgtgaaatgactgaaatggctaaaggaagcgtgacgcatcagcggttaatcgctttattaagtcaagaaggtgctgacttccgcgtcgttacccatgaagcggtaggtaaatgtgaagcggtgagtgaaattcgtggcaccgctctaggccagggtgctaaggcactggtatgtaaagtcaaaggcaatggcgtaaatcaacatgttctggcgatcctcgcagccgatcaacaggccgatctgagccaactcgccagccatataggcggattacgcgctagcttggccagcccggcggaagtcgatgaactcacaggctgtgtcttcggcgcgatcccccctttcagcttccatccaaaactcaaactggttgccgaccctctactcttcgaacgatttgatgaaatcgccttcaatgcaggcatgctggataaatccgttattttgaaaaccgcggattatttgcgcattgcgcaaccagaactggtcaatttccgccgcactgcgtaattagccggtccgttcgataagaagaacggacaaaaccagtacaacagcaatggcaaaaaagctactcgtgataatcagtgtctcgacaaacatttgatcgttcatagcatgcccccgggagatagctgttttcacgttattgttagcgtgcacaaatggcagtttgatgacagttcgcctgattttttatgcaaaaaacgtaaagattttctacttccttcctgcagcaagcgtaaagtaagcaggcttattattttttggcaaggaaaccacgatgtttgatgtcactttgctgatcctgctcgggttagctgcgctgggctttatcagtcataacaccactgtcgccgttagtattctggtgttaatcattgtccgcgtcacaccgttaagcaccttttttccgtggattgaaaaacaggggctaagtatcgggataatcattctgacgattggcgttatggcccccatcgccagcgggacgctaccgcccagtaccttgattcacagctttctgaactggaaaagtctggtggcgattgcagtaggcgtgattgtctcctggctgggtgggcgcggcgtgacgttaatgggcagccagccgcaactggtcgccgggctgctggtaggcactgttttaggcgtagcgctgtttcgcggcgtaccggttgggccgcttattgccgcgggtctggttagcctgattgtggggaaacagtaattattgccgcgggtctggtttcgcactttgtggggaaacagtagttaatctcgcaatatatcggcctggcgtttgccccaggcctttcttaaacatagtaataaaggccgttgtactatcataccccagcgtatgagcaactttctgtacagtatcgcctttcactaatccctgaagcgccataatcagctgtaactgctgacgccactggcgaaaactcaaccccgtctcttttactatcagtcgggcaagattgcgttcactcatcgcaaaaaagccagcccattgccccaatgccccccactcgacaggccctttcgccatcatctccaccatcgtgcggattttaggatgagaagaaacgggcaggtgcagctgttgttgtggctgctgagggagttcatcaaacaggacctgaattaatctgcgggtcattggctcagcacgctgagtcgtcgtcctgtttgccagggttaaaattaattcccggcataaggggcttattttcaatgtgcaacatgttgtcggcattgtcactgcgctgggttcgataaacagaaaacagagttcagcattagctgttacttgattgctatgttccaccccgcccggtatccaaaccgcatattgtggcggcaccatccacaaagcattttccaccgtacaggtaattgcaccatgtagcgccagtatcagctgtcctttgcggtgctgatgtacaggactggttaactcatccgttccggcgtgaatacaaaatgcgaccgcggcttcatggtgtcggtcgggttcatagccattgagattcaacctgtgcatcattttgtccgaacttagcgataatttgtcattttagcttgattcaacataacaataaaaacggtaaggtacagcctcgtttgtaacaatgagaagcatatgacctgtagtactagtttaagcggcaaaaacaggattgtccttatcgctggcattctgatgattgccacaacattacgcgtcacctttaccggcgcagcaccgttactggatacgattcgttccgcttacagcctgacgacagcgcaaaccggcttattgaccaccctgccattattggcctttgcgctaatcagtcctttggctgccccggtagcgcgacgttttggtatggaacgtagcctgtttgccgcgttacttttgatctgtgctggtatcgcaattcgctctctccctagcccttacttattatttggcggtacagcggtcattggcggtgggattgcattaggcaatgtcttactgccaggattaattaaacgcgatttccctcattccgtcgccagacttaccggcgcatattccctgacaatgggagctgcagcggcactgggaagcgctatggtcgtgccgctggctttgaacggttttggctggcaaggcgcgttgctcatgctgatgtgttttcctctgctggctctttttttatggctgccacagtggcgaagtcaacaacatgcaaatttgagtaccagccgcgccttacatactcggggtatctggcgtagtccgcttgcctggcaggtcacattgtttcttgggatcaacagtctggtctattacgtgattattggctggcttccggcgatcctcatcagtcacggctatagcgaagcacaggcgggtagtctgcatggtttgctgcaactagccacagcagcacccggtttgctgatcccacttttcttacatcatgtgaaagatcagcgtggtattgcagcgttcgttgccttgatgtgcgcagtgggcgcggttgggctctgctttatgccagcgcacgcgatcacctggactctgcttttcggttttggttccggcgcaacaatgatactggggttgacgttcattggtctgcgggctagttctgcgcatcaggcggcggcactcagcgggatggcacaatccgtcgggtatttgttggcagcctgtgggccgccgctgatgggtaaaatacacgatgctaacggtaactggtctgtaccacttatgggtgttgccatacttagtctactgatggcgattttcggactttgcgccgggagagacaaagaaattcgctaatatccggtgctatagtgacgtaacaaatcatgcgtgaaagggagaacaaacacgatgaatattcagtgcaaacgcgtttatgatccggctgaacagagcgatggttatcgcatactggtcgaccgcctctggccgcgcggtatcaaaaaaaccgatttagcccttgatgagtgggataaagaaatcacgccgagtacggaactgcgcaaagcctttcacggcgaagtcgtcgattatgcaacctttcgcgagcaatatcttgcagaactggcgcaacacgagcaagaaggaaagcggctggcggacatcgccaaaaaacagccgctgaccctgctctacagtgcaaaaaacaccacgcagaaccatgcgctggtgctggccgactggctacgtagcttgtgattttagtacagcatccggcggttatttttcaccagccggatggtcacgccgccacaatgcccattcatcaatcgtttcaccgcccggtaatttgcaattgttgctgaccccttgcgctgtctgcactggaatgagcgtcccgcccttctgctggcaatagacgctcgccggatttgccataccaatctgcggcggtttaggtgcttctggctgagaaggggtactacaaccagccaggaccagcaagcaaggcagaacaaaactgataattttcatttattgatctcacatatttatccaagattagagtatcgcggtatcgttttgttttgcagcactatttttattacattcactcaaaacatattacgtcttgtttcatctttgttgatgatgttttatcatgcctgcaaagattaaataatcagcatttacccgccgtatcctggagttgttccgtgagtgatcagattatcgcccgcgtcagccaatcccttgccaaagaacagagtctggaaagtctggtccgacagcttctggagatgctggaaatggtcactgatatggaaagtacctacctgaccaaagtggatgtcgaagcgcgcctgcagcatattatgtttgcccgtaacagccagaaaatgtacatcccggagaattttaccgtcagctgggattacagcttatgcaaacgcgccattgatgaaaactgctttttcagcgatgaagtccccgaccgttggggtgactgtattgcggcacgcaatcttggcatcaccacatttctgagcacgccaattcacttaccggatggaagtttctatggcacgctttgcgccgccagcagtgagaagcgccagtggagtgaacgcgcggaacaggttttacagttattcgccggactgattgcacaatatattcaaaaagaggcactggttgaacagctgcgcgaagccaatgctgcgctgattgcgcaaagctataccgacagcttaaccgggctaccgaatcggcgggcgatttttgaaaatctgacgacactgttttccctcgcccggcatcttaaccataagataatgatcgcgtttatcgatctggataacttcaaattaatcaatgatcgttttggtcataatagtggcgatctgtttctcattcaggttggcgagcgccttaatacgctccagcaaaatggcgaagttattggtcgtctcggcggtgatgagtttttagttgttagtctaaacaacgagaatgcggatattagcagcctgcgagaacgcattcagcagcaaatacgtggagaatatcacttaggtgatgttgatttgtattatcccggtgccagtcttggcatagtagaagtcgatcctgaaacaaccgatgcagacagtgccctgcatgctgccgatattgcgatgtatcaggagaaaaaacacaaacagaaaacaccttttgtcgcgcatccagcgctacattcctgaggcgtattcacatccttttgattggtgataacatgcgaatcggtattatttttccggttgtaatcttcattacagcggtcgtatttttagcatggttttttattggcggctatgctgccccgggagcataaagatgaaaaaaacaacgattattatgatgggtgtggcgattattgtcgtactcggcactgagctgggatggtggtaacgtcacctctaaaaaatagcaaaggctgcctgtgtgcagcctttgtgcaatttaagcgttaacttttaatcttcctgtagataaatagcacgacaatcgcaccaataacggcaaccacgaagctgccaaaattgaagccatcgactttaccaaagccaaacagcgtgctgatccatccgccgactacggcaccgactatccccagcaggatagtcataaagaatccacctccatctttacctggcatgatccacttcgccagaataccggcaataagcccaaaaataatccaactcagaatgcccattgtttcctcacttatctgttttgcattagcgggttagtcgctgataaaaagcatagcacaacatcgggagggcaagatttgtgacgagcatcacggaggttttttttgcgatggcgcagaaattgcgccatcaacgatcagtgataattaccaaccacaaacatcatgttcgttttccgtgtcataagaacgtacggtattcaccagatcttttatcacttcagccgccacttctggcaccagcaaagtcatcggcgtctctgtttcataatcgacagaaacgccattgctgttattggtgacggtcacggtatacgttgctttgcccatgattcatttcccgttatgaatgactttccgttgttgcgcaccttccatcaggacttcaggagccacgaagaagtcaatgttgaaataagtatcgtcagtcatggcttcaatgttgtgccacttttctggagggaacaccgcaaactgccccgcttcgataaggatcacctgatcaggctctgcactgtgttcatcagcgtagccgagatatttgaccgccccatgcataacggaaaggcgtgggtaaacccccgggcgcgttcctttatcaagatgacgttcgaatattccggcaggtgcagtttgtttattccagaaaggcgtactgcgcgtatgaatataattctgtgggatttgaagcatccttttccctccttcggtgaatgcgctgaaaacggtttattccagccgtttcagggtacgcctgataatttgcattttaaataccatttattggttactttttagcaccatatcagcgaagaatcagggaggattatagatgggaagcccgcgacaacgcgggctgaaagcatcaggattgcagcgtcgccagtcgggcagcgaaacccacgaacatcaaaccaatcagactgttgccaactttagccagtttctttttggtacgtatgtactgcgtgacaaaagcaccagatataatcaggaagctcaaatagcagaaactcaccagttccagcgtcgccgccagaataaagaaactaattcccgtatgtggggcattaacatcgataaactgtacgaaaaagctcacatagaacaaaatggctttcggattagtcaggctcaaaattaacgcgcgtttaaaaatagcaccgtattggggctcatcggatttggcctcgctatttttacccttcagggtcgcgtaaagaattttactccccagatagagcaaataaaacgcaccaagataacgtacaatgttgaataatatcggggtggtcttaattaatgtcgccactccagcccatgccagaaacatcaataccgcatcgccaataaatacaccgcaggccgcaagataaccgcctttcataccgctactgacgctatttttgagtacaaacagggtatttggccctggcaccaacacaataaaaatggccccaaccagataggtccagtaattcagaaccccgtattcagcgaacacattaacctctttaattatctttcgatcatgcgcgattaaaggtgaatatgctaaccaatctgtagcggcttagaaaggagaaaatcaggttttaacctgatatcaacccgataattgaatcattaatcaggcatgctccagactaaaattcgggtagtgctcggcaaaatactggcgtaaaaattctaccgttatccgcactttcgcactcgtcgccagcctactaacataaacggcccagacgttcgctggctggtaatattccggtagcacttgcactaaatgaccactggcaatgttttcgctaacatcccaccaggaacgcagagcaatcccctgcccatcgagacaccactgatggacaatttctccatgattagagctcagtgggccggtgactttaatcgcatgggggccttctttattgcgtaattgccagacaccaaaaggatgatcgcgctctttaatgaccaggcacggcaatgcagaaagatcggttaaatgtttcggcgcgccatgttgcgcaataaattccgggctcgcgcagagaatacggtaattggtcgccagtttgcgggcgattaaattaggggcgatgtcatcgccaatgcgaatatcgagatcgacaccttcattgaccaaatcgaccagtcggtcttccacatcaaaacgtaattccagttgcggatacgccttcgccagcgctaataacgccggagccaccacctgtcgtccaaaaccaaagctgctgataatacgcagcatcccctgcggcacctgacgcacgtcagaaagttcgtccatcatctgaccgacatcctgcaaaatccgctgcgcccattcataaatccgctctccttcttcggtaatggtgacgcggcgggtggtgcggtgtaacaacaccacgtttagcgtttgctccagcaaggcgatgcgcttgctgacgaacgccggactaacgcccagttcttccgccacggcggcaaaaccagcccggcgagccaccagcataaagacgcgcaaatcattcagcagcggtaaattattcatgattcgtgttttatgtttcaccagttacggggattaattccttttcagtcaattataggatggtgatgttgtcaattttgatggtcaggaagtgagaacccaatgatgaaaacgatgcgtattgctgcgatcccgggagacgggattggcaaagaagtccttcctgaagggattcgcgtgttacaggctgccgctgagcgctggggcttcgccttgagttttgagcaaatggagtgggcgagctgcgagtattacagccatcacggtaaaatgatgccggacgactggcatgagcaacttagccgtttcgacgccatctattttggtgccgtcggctggccggataccgttccggaccatattagcttgtggggtagcctgctgaaatttcgtcgtgaattcgaccagtacgtcaacctgcgcccggttcgtctctttcctggcgttccctgcccgctggcgggaaaacagcctggcgacatcgatttttacgtggtcagggaaaacaccgaaggcgaatattccagcctcggcggtagagtgaatgaaggtacagagcatgaagtcgtcattcaggaaagcgtatttacccgccgtggtgtcgatcgcattttgcgttatgccttcgaacttgcgcaaagccgtccacgtaagacactaacttctgccactaaaagcaacggtttagccatcagcatgccgtactgggatgagcgagtggaagcaatggccgagaattacccggagatccgctgggacaagcagcatattgatattctctgcgcgcgttttgtgatgcagccggaacgattcgatgtggtggtggcgtccaatttgtttggcgatatcctttccgatcttggcccggcctgcaccggcaccattggcattgccccatccgccaacctgaatccggaacgcactttcccgagcctcttcgagcctgtccacggttccgcgccggatatctacgggaaaaatattgctaaccctatcgccacgatttgggccggggcaatgatgctcgattttctcggcaatggcgatgagcgtttccagcaagcgcataacggtattctggcagcaattgaagaagtgattgctcacgggccgaaaacacctgatatgaaaggcaatgccaccacgccacaggttgccgacgcgatttgcaaaattattttgcgttaaggtcaaaccagtttatttgaaccgcgtcactgacgcggtttttttattcgttctttgcagtaaataacctgcgtcatttcaccttttattgtttccgtttcgtgttttatggctttccgtattcttaattgtttaatttatgtaacatgcaaattttgttacgcgtacgttaggttccgccgtacaggtattggttttgctggcaatgggactggtgatttatttagccaccagtaaatacggcaatattcgtcttggcgaaggaaaaccggaatacagcacgctctcctggctgtttatgtttatttgtgccggtttaggttcttctacgctttattggggggttgctgaatgggcctattattatcaaacacctggattaaatatcgcaccgcgtagtcaacaggcactcgaatttagcgttccctactctttcttccactggggcatcagcgcctgggcaacttatacgctggccagtttaatcatggcttatcactttcatgtgcggaaaaacaaaggtctgagcctttccggcattattgctgctattaccggcgttcgcccgcaaggcccatggggaaaactggtcgatttgatgttcctgatcgccactgtcggcgcactgaccatttcccttgttgttaccgcagcaacctttacccgtgggctttccgcgctgaccggtttacccgataacttcaccgtgcaggcatttgtgatcctgctttccggcggcattttttgcctaagcagctggattggtatcaacaacggtttgcaacgtctgagcaaaatggttggctggggcgcgttcctgctgccattactggtgctgattgtcggcccaaccgaatttattaccaacagcatcatcaatgccatcggcctgaccacgcaaaacttcctgcaaatgagcttattcaccgatccgcttggcgatggtagttttacccgcaactggaccgttttctactggctgtggtggatcagttacacccctggcgtagcaatgtttgtcacccgcgtttcccgcggtcgtaagattaaagaagttatctggggactgatcctcggcagcaccgtcggttgctggttcttctttggcgtaatggaaagctatgccattcatcagtttatcaatggcgtaatcaacgtcccacaggtgctggaaacactgggcggcgaaacagctgtacagcaagttctgatgagcttgccagccggtaaattgttcctcgccgcatacctgggcgtgatgattattttccttgccagccatatggatgcagtggcctacaccatggcggcgaccagtacgcgtaatctccaggaaggtgacgatcctgaccgtgggctgcgtcttttctggtgcgtggtgatcactctgatcccgctttccatcttgtttaccggtgctagcctggaaacgatgaaaaccaccgtcgtgctcacagcccttcccttcctcgtcattttactggtgaaagtcggcgggtttattcgctggctgaaacaggattacgccgacattccggctcatcaagttgaacattatctcccgcagacaccggttgaagccctggaaaaaacgccagtgctccctgcgggaaccgtattcaaaggcgacaactgagcgccatcatcctaacgataaaggtatccctatgagcaatctgagccctgactttgtactacccgaaaatttttgcgctaacccgcaagaggcgtggaccattcctgcccgtttttataccgatcagaacgcgtttgaacacgaaaaagagaacgtcttcgccaaaagctggatttgcgtcgctcacagcagcgaactggcgaatgccaatgattatgtgacgcgtgagatcattggcgaaagcatcgtgctggtacgcggtcgtgataaggttttgcgcgcgttctataacgtgtgtccgcaccgtggtcatcagttgttgagcggtgaaggaaaagcaaaaaatgtgattacctgcccgtatcacgcatgggcattcaaactcgatggcaacctggcccatgcacgtaactgcgaaaacgtcgccaatttcgatagcgacaaagcgcaactggttccggtgcgtctggaagaatatgccggattcgtcttcatcaacatggaccccaacgccaccagcgtagaagatcaattacccggcctgggcgcgaaagtgctggaagcctgcccggaagtccacgatctgaaactggcggcccgctttaccacccgcacgcctgccaactggaagaacattgtcgataactatctcgagtgctatcactgtggtccggcgcatccaggtttctccgactccgtacaggttgatcgttactggcacaccatgcacggtaactggacgctgcaatacggtttcgccaaaccgtccgaacagagctttaaatttgaagagggtacggatgcggcattccacggtttctggctgtggccgtgcacgatgctgaacgtcaccccgatcaaagggatgatgacggtcatttatgaattcccggtggattctgaaactaccctgcaaaactacgatatttacttcaccaatgaagagttaaccgacgagcaaaaaagcctgattgagtggtatcgcgatgtgttccgtccggaagatttacgtctggttgaaagcgtacagaaagggctgaaaagccgtggctatcgtggtcaggggcgcatcatggccgacagtagcggtagtggcatttccgaacatggtatcgcccatttccataatctgctggcgcaggtgtttaaggactaatgacatcggcggcggtattttccgccgctgggctgatttttgatggagtacagcaatgagtgactatcaaatgtttgaagtacaggtgagccaggttgaaccccttaccgaacaggtgaaacgcttcacgctggtggcaaccgatggcaaaccattacctgcgtttaccggaggaagtcacgtcattgtgcagatgagcgatggtgataaccagtacagcaatgcgtatagtctactgagtagcccgcatgacacctcttgttatcagattgccgttcggctggaggaaaacagccgcggcggttcccgctttttgcatcagcaggtaaaagtgggcgatcggttaacgattagtacgcctaataacctgtttgcgctaattcccagtgccagaaagcatctgtttatcgcgggcggtattggtatcacccctttcctgagccacatggcagagctgcaacacagcgacgtcgactggcagctacattactgcagccgaaatccagaaagttgcgcatttcgtgatgagctagtccagcatccgcaggctgagaaagtccatttgcatcatagtagtaccggaacacgactggaattagcgcgattattggcggatatcgaacctggcacacacgtttatacctgtggccccgaggcgctaattgaagcggtaagaagtgaagctgcgcgtctggacatcgccgccgatacgctgcactttgagcaatttgctatcgaagacaaaaccggcgatgcatttaccctggtgcttgcccgttccggaaaagagtttgtggtgccggaagagatgactattttgcaggttattgaaaataataaagccgcgaaagtggaatgtttatgtcgtgaaggggtatgcggaacctgcgaaacagcaatactggaaggtgaagctgaccatcgggatcaatattttagcgatgaagagcgtgccagccagcaaagtatgttgatctgttgtagccgtgcgaagggtaaacgcctggtgttggatttgtaatttgccgaagccggatgtggcgctgagcgcgcccagtccggcttcggaagattttactgcggatattcctgcaataaattgtgtaatgcttccgccatcagctcaccacgccagccggaaatcagctccggcaaattgttctgcggtttcagtttccagtgccagttcagcagttggttgatttgccgacggcttgccagcaattcggcgctgatcttatgcgtttcgctcacgtcagtaatcaggctcttaatcgctttaaacgctttacgataacccggcatgtccatcaggttaagcatcggctgcggtaaggcatcttccggcaatgtctgcgctttttccaccagcgctagcagcgttttaccgtgaaagcggatttcgctaccggataaacccaggctgtccagttcgcctaaacttcccggcatataacgcgctacgctccacaaatgctcttcacgcacgacaaagttcaccgccagatcgcgctctcgcgccttgcgcagtcgccagtcggctaacagttgcagacaggccagttggcgtgtgcgtaattgccaggcattggtgatatcacgccaggcatcttccggcgcaacgacttcctgacgacgcatttgcatcaggcggcattcatccagcgccgcaggtagccagccggaggcctccgtttctaccataagcttggcggtgatcggtaacagataccagacatccgccgctgcgtattcacactgacgttcggtcagcggtctggccagccagtcggtgcggctttcactcttgtccagcgtaacgccggaatactcttccaccatggaagcgaaaccccaactcatcgggcgtccgcagaaggcagcaaggatttgcgtgtcaatcaagggttgtggtaattcgccaaagacattgaggaacacttccagatcttcactgcctgcatggagaaattttgtgatggacggatcgcgcaggatcgctttcagcggactccagtcggtgatcccgagtggatcgattagcgccagatgctcgccatcgaaaagttgaatcaaccccagctgcgggtaataagtgcgcgtacgaacaaattcagtatccagggctatcgccggaaaggcacggacggcttcacacaaagaagccagcgcatcgtccgtggtaatcatttggtaattcaaattgttttctctttagtgggcgtcaaaaaaaacgccggattaaccggcgtctgacgactgacttaacgctcaggctttattgtccactttgccgcgcgcttcgtcacgtaattctcgtcgcaaaatttttccgacgttagatttcggtaactcatcacgaaactccaccagcttcggtactttgtatcccgtgagctgacggcggcaaaaagtcaccagactctcttcggtaaggcttggatcttttttcactacgaagattttcaccgcttcaccactggagccggaaggtacgccaacagccgcgacttcctgtacgccaggatgctgcatgacgacatcttcaatctcgttgggatagacgttaaaaccggaaaccagaatcatgtcttttttacgatcgacaatgcgcaggaatccttcttcatccattaccgcgatgtcgccggtgtgtaaccagccatttttgatgatttcatcggtagcatcgggacgctgccagtaacccagcatcacctgcggtcctttgacacaaagctcacccggttgacctggtggtacttcattatcatcatcatccaccagtttggcttccgtgctcggcaccggcaaaccgatgctaccactatgataatcaatatcatatgggttaacgctgaccagcggcgcacactcggtaaggccatagccttccagcagatactgtccggtcagtttcacccaacgctctgccaccacttgctgcactggcatcccaccgcctgcggaaagatgcagactggagaaatccagctgctggaactctttattgttcagcaacgcattgaacaaggtgttaacgcccgtgatagcggtaaacggatatttcgctaactcttttaccaaccctggaatatcgcgcgggttagtgataagcaggttctgcccacccagttcgataaacagcaggcagttaatggtcagggcaaaaatgtgatacagcggcagcgccgtcaccaccagctctttgcccggatgcaacagcggaccataggtcgcgttaacctgttccaggttcgccagcatattgcggtgagtcagcatcgcgcctttcgccacaccagtggtgccgccggtgtattgcagaaaagctaaatcttccggcaccagttcgggtttgacgtactgcatccggtagccgttatgcagtgcgctacgaaaactaatggcatctggcagatggtatttcggcaccaaacgcttgatgtatttaacaacgaaattgactaccgtgccttttgccgtagatagctgatcgcccatacgggtcagaattacgtgctgaacggcggttttatcaaccactttttccagtgtgtgagcaaagttagacacgataacaatcgcgcttgcgccgctatcgttaagctgatgctcaagctcacgcggggtatacaacgggttaacgtttacgacgatcatcccggcacgcaaaatgccaaacagcgccaccggatattgcaataaattaggcatcatcaacgcaacgcgatcgcctttcttcagccccaacccttgttgcaaataagcggcaaacgcgcgactgcgttcttccagcttgcggaaggtcattacctcccccatattcacaaacgcaggttgatcggcgtagcgcgcgacgctctgctcaaacatatctaccagagattgataacggtcagggttgatctccgtcggaacgtccgcgggataacggttaagccaaaccttcttcaattcttcacctctaaaatgcgtgttcgtcgtcatcgcaaccccaaatgatatacatgccgttaacataatattaactcatcataccagcttgataattacccaacgaaaaggttgcgaagcgcgtcactatttatttttatctttaccgtaagaatgcagaaacagcggaccagccgctgtttctttttctttaaaaacaagcaattattcagttacaactgtttgtactctcgcggggccgggattataccagccccatccgccgtagccatagggccagccacgaccgccataaaaccatggatcaatcggctgaggcggcataatcacctgctgggttaaatgccaacgtttgtaacccgttacttgcatcaccataaatttatagggcgtattgccgattttgccgtcaaccgcaccagtgattggcccgactaccgtaaccagttgtccacggaaatccaccgggtccagaaaaccgttcacatcggcataaatgcgaccgcgagaaggttctcccagcgtcggtctggctccgctgtccagcggtacggtagcaatttccaggcgagttttcccttgctggttttgtaccgcaaccactttgccaccaaagcgtgcctcctgaccaacgtacagctgcggcgcactcatcacccgaactaaatcttgttgcggcgtgggactgctgcctttaatggcgtccggcacagtgacacaaccgctcagcattagcgcaaacgtacctgccagtatgcctttgataacattcttttgaaccgccatggtgcgactcctttttttctcagggcatactcttaagattcattctttgcccggaagtttcttccatgcgacgttgttacgtaaataaaccggttcggcatgttccaccgccaccgttttaccctcagcaaacatctgacacgcaatcggcagcatatcttcagcagcaggcagtaacacttcgccatcgcgcaaaaccagcccgctctctttaccgagatccggccaagcttgccagcccgtccctaccgtcacccattcgccggaaagctgttgcattcgttcatggacgatttcgggtttgagtacggcttcggtttcttcaccgtgccagataccgttttcatcacgctgatattcggcccagtaaacttcgcccattcgcgcgtcaatggctgccagcacgcgggttgcgccgtttttgcgccacgccccttgcgccatcgtcattagcgtggagacgccaatcatcggtaattccgcgccaagcgccagcccttgcgcgatgccaataccaatgcgcacgccagtaaagctaccggggccgcgcccgtaagccagagcgttaatatcagtcagggaagttccgctggtggtcaggatatcctgcaccatcggtaagattcgttgagtatgttcacgagggcaaagctcaaaatgagcgttgacagtaccgtcgttccacagggcgacagagcaggcctctgtcgcggtatcgatagccagaattcgcatgggtcttcgtgcttagatcaataaaaaggcgcgcatcataccatactccgtaacaaattacctggaggatggtatcgcaaggaaacgaaccgcacgggcaatgtcacgggtgcgtggcgcgggcggcagactggcgagaaacgtcgcgccgtaaggacgcatcaccagccgattgtcacaaatcaccagcacgccacgatcgtcggcgtcgcgaatcagtcgccctaccccctgtttgagagtaatgacggcatctggtagttgcacttcatcgaacgggtcgccaccgcgcaaacgacaatcttccatgcgcgcttttaacagtggatcatccgggctggtaaacggcaatttgtcgataattaccaaactcaatgtatcgccacgcacgtccaccccttcccagaaactgctggttgccacaagaagcgcattaccggcgctgacaaattgctgcaacagttgccctttgctggtttccccctgcaacaatacaggaagcgtcatggtagcgcggaactgctcggccagatcgcgcatcatggcgtggctggtacaaagcataaaacaacgaccgttgttagcttcgatgatcggtcgcagcattgccgctaactggcgagcagaacctggctggttggtttgcggcagattgcgcagcacacagagtaacgcctggcggctgtaatcaaatgggctgggcaacagcaagctctcggcctgttcgatgccaagccggctggtgaaatgatgcagatcgtcgttcacgctcagcgttgcactggtgaagatccagctaccgggtttttgcgccattaactctttgaatttatccgccacgctgagcggcgtgagagccagagtaaaatggcggctagtgcattcgtaccagtagctgtagcccggctgattgatctcttttagccgcttcagccgtgtgcgatacaacgtggcgcgctcaaatgccgcatccagcaaggcggaacgccccagactcagtttcgccacgtcataacaaagttccagggtgtcatcgagcagtaaaaatgcccgctgaatttgcggattagctaacagctcacgcaggttaccgcgataacctggctcaccgagttgcagacgaaaatcctgcgcactctgggcaagacgatcagcgcacttttgtaactgctgggtgtcttttaattcggtgcggtaggcgatggtgatgtcttttgccaggtcgagcagttgtcgactggagagactctgaccaaaatactggctggcaatgtccggtagctggtgggcttcgtcgaagatcatgacgtccgcttccgggatcagttcgccaaatccactctctttaaccaccatatccgccagaaagagatgatggtttaccaccaccacatcggcgtccatcgcttttttacgtgctttgaccacaaagcaatctttatacatcgggcagtcgctgccaagacagttgtcgttggtgctggtgaccagcggccacgcctgactatcttccgccacgctgacgcaggtgctgatatcaccatcgactgtttgattagaccaggagcgcagcaggatcacatcgcttaagatttgtaccggcagatcgccccccgccagcgcctgctgttcgagacgttcgaggcagaggtagttactgcgccctttcagcagcgccacgttgcccgtatatttcaatgccttactgactgttggcaaatcgcggctgtagagctgatcctgcaacgctttactgccggtgctgataatgactttctttttcgcccgcagcgcaggagccaggtaagcgtaggttttgcccgtaccggttcctgcttccaccaccagcggctggcctttttctatcgcctgggtgacggctaccgccatctgtcgctgtggttctcgcggcttaaagcctggtatcgctttcgccagctgaccgtctggtgcaaaatcgtccgtcacactaccccctgttgatttgaacagggattatgtcaggatgagggcgctttcgccagttgaagtggtgacggcgacctcacattgtggcagtctttgcagcacgaaaatggaagtataatgaggacaaaatgatgactatcgttcgtatcgatgctgaagcccgctggtctgatgtagtaatccacaacaacacgctctactacactggtgtaccggaaaacctcgacgccgatgcctttgagcaaaccgccaacacgctggcacagattgacgccgtgctggaaaaacagggcagcaataaaagcagcattctggatgccaccattttcctggccgataaaaacgacttcgcggcgatgaataaagcgtgggatgcttgggttgtcgcgggtcatgcgccggtgcgctgcacggtacaagcgggtttgatgaacccgaagtataaagttgaaattaagattgtggctgcggtgtaagctttatcgaagcaaaataagtcagacgataatttatcgataatactggtcggttttacataaatcgaccagagaataagatattactgttgatgcttctgctaattcattatttatatttataatttcaattttatctataaaactaactatataaataaacataaacatgccgttgtgttcgccctttgattagcaactctggttttctttcttagctgaacaatctggttatagcgtgcggactgaccgttaaatttctccatcttactggataacacaccatgagctgctacctttaaaacacctgaatgtcaacaggttaactcgtgccatatcgttataatccctttgatattagatgcaaattaaggtcatatatagccttatcgataacatggttaattttaaggataagaatatgcctgctgtaatagataaagccctggatttcattggtgccatggatgtaagtgcgccaacaccaagtagcatgaatgaaagcacggcgaagggaatctttaaatatttaaaagaactgggagtacccgcgagtgccgctgatattacggcgcgagctgaccaggaaggctggaaccctgggttcacggaaaaaatggttggatgggcaaaaaaaatggagacaggtgaacgttctgtgattaaaaatcctgaatactttagtacatatatgcaggaagaactaaaagcactggtctgagttaaatttatatcagcataaatgggtcaggacgcttttaatcacatataaaaagcgtcctttttctcacaatcaaatgatcatcggcttctataacgaaatcgatacggattagtgtgttactcgtcttcatcctcaaaacgcgccacgattcgctcgccggagtggttggcacgcagctcttctgccaccagcgcgattgcctggccgctgctcatcccttgtgccatcagttcctggatccgctcgacagctttttgctgctgttcatgggtgagactaggtaaacctgcaaacattgttaactcctgctaaattgttggcgctaattatttcatgctacccggcacatagccagtagagtcaggactgatgaagacgttatctcccgctgtgattactttactctggcgtcaggacgccgctgaattttatttctcccgcttaagccacctgccgtgggcgatgcttttacactccggctatgccgatcatccgtatagccgctttgatattgtggtcgccgagccgatttgcactttaaccactttcggtaaagaaaccgttgttagtgaaagcgaaaaacgcacaacgaccactgatgacccgctacaggtgctccagcaggtgctggatcgcgcagacattcgcccaacgcataacgaagatttgccatttcagggcggcgcactggggttgtttggctacgatctgggccgccgttttgagagtctgccagaaattgcggaacaagatatcgttctgccggatatggcagtgggtatctacgattgggcgctcattgtcgaccaccagcgtcatacagtttctttgctgagtcataatgatgtcaatgcccgtcgggcctggctggaaagccagcaattcagcccgcaggaagatttcacgctcacttccgactggcaatccaatatgacccgcgagcagtacggcgaaaaatttcgccaggtacaggaatatctgcacagcggtgattgctatcaggtgaatctcgcccaacgttttcatgcgacctattctggcgatgaatggcaggcattccttcagcttaatcaggccaaccgcgcgccatttagcgcttttttacgtcttgaacagggtgcaattttaagccttagcccagagcggtttattctttgtgataatagtgaaatccagacccgcccgattaaaggcacgctaccacgcctgcccgatcctcaggaagatagcaaacaagcagtaaaactggcgaacagtgcgaaagatcgtgccgaaaatctgatgattgtcgatttaatgcgtaatgatatcggtcgtgttgccgtagcaggtagcgtaaaagtaccagagctgttcgtggtggaacccttccctgccgtgcatcatctggtcagcaccataacggcgcaactaccagaacagttacacgccagcgatctgctgcgcgcagcttttcctggtggcagtataaccggggctccgaaagtacgggctatggaaattatcgacgaactggaaccgcagcgacgcaatgcctggtgcggcagcattggctatttgagcttttgcggcaacatggataccagtattactatccgcacgctgactgccattaacggacaaattttctgctctgcgggcggtggaattgtcgccgatagccaggaagaagcggaatatcaggaaacttttgataaagttaatcgtatcctgaagcaactggagaagtaagacgtggaataccgtagcctgacgcttgatgattttttaagccgctttcaacttttgcgcccgcaaattaaccgggaaaccctaaatcatcgtcaggctgctgtgttaatccccatcgtccgtcgaccgcaaccggggttgttgctgactcagcgtagcattcatctgcgtaaacacgctggacaagtggcattccctggaggtgcagtcgatgacacggacgcaagtgctatcgccgccgcgctgcgcgaagctgaagaagaggtcgctataccgccttccgccgttgaagttatcggcgtgctgccgcccgtcgatagcgtcactggctaccaggtaaccccagtggtcggcattatcccgcccgatctgccgtatcgcgccagtgaagatgaagtcagcgcggtgtttgaaatgccgctcgcccaggcattacatctgggtcgttatcaccctttagatatctaccgccgtggtgatagtcatcgggtatggctgtcctggtacgaacagtattttgtatggggaatgaccgcaggcataattcgtgagctggcgctgcaaattggtgtgaaaccctgactatacttatctttacatctacaaaacactacttgagacaatcatcgcaatattagttaaatcgcggtttttgattagtttaattcatgtgaatagttaagccagtcgccgcgttccctcttacactatgcgctgttattagttcgttactggaagtccagtcaccttgtcaggagtattatcgtgattagtctattcgacatgtttaaggtggggattggtcccagttcttcccataccgtagggcctatgaaggcaggtaaacagttcgtcgatgatctggtcgaaaaaggcttactggatagcgttactcgcgttgccgtggacgtttatggtagtctgagcctgacgggtaaaggccaccacaccgatatcgccattattatgggtcttgcaggtaacgaacctgccaccgtggatatcgacagtattcccggttttattcgcgacgtagaagagcgcgaacgtctgctgctggcacagggacggcatgaagtggatttcccgcgcgacaacgggatgcgttttcataacggcaacctgccgctgcatgaaaacggtatgcaaatccacgcctataacggcgatgaagtcgtctacagcaaaacttattattccatcggcggcggttttatcgtcgatgaagaacactttggtcaggatgctgccaacgaagtaagcgtgccgtatccgttcaaatctgccaccgaactgctcgcgtactgtaatgaaaccggctatagcctgtctggtctcgctatgcagaacgaactggcgctgcacagcaagaaagagatcgacgagtatttcgcgcatgtctggcaaaccatgcaggcatgtatcgatcgcgggatgaacaccgaaggtgtactgccaggcccgctgcgcgtgccacgtcgtgcgtctgccctgcgccggatgctggtttccagcgataaactgtctaacgatccgatgaatgtcattgactgggtaaacatgtttgcgctggcagttaacgaagaaaacgccgccggtggtcgtgtggtaactgcgccaaccaacggtgcctgcggtatcgttccggcagtgctggcttactatgaccactttattgaaagcgtcagcccggacatctatacccgttactttatggcagcgggcgcgattggtgcattgtataaaatgaacgcctctatttccggtgcggaagttggttgccagggcgaagtgggtgttgcctgtagtatggctgctgcgggtcttgcagaactgctgggcggtagcccggaacaggtttgcgtggcggcggaaattggcatggaacacaaccttggtttaacctgcgacccggttgcagggcaggttcaggtgccgtgcattgagcgtaatgccattgcctctgtgaaggcgattaacgccgcgcggatggctctgcgccgcaccagtgcaccgcgcgtcagcctggataaggtcatcgaaacgatgtacgaaaccggtaaggatatgaacgccaaataccgcgaaaccagtcgcggtggtctggcaatcaaagtccagtgtgactaatacttcttactcgcccatctgcaacggatgggcgaatttatacccgctttctcgtctgctgtaatattccccactacacttccactgttgcgtcaggcgtttgtcgccatacgcttacagggtggcccgcatgcaaaaagcacaacggatcattaaaacctatcgtcgtaatcgaatgattgtttgtacgatttgcgcactcgttacgctcgctagcaccctgagcgtgcgatttattagtcagcgtaacttaaatcaacaacgggtagtacaattcgccaatcacgctgtagaggaattagataaagtactgcttcccctacaggcaggtagcgaagtcttgcttccgctgattggtctgccctgctctgtcgcccatttgccattacgtaaacaggcggcaaaactccaaactgtgcgatccattggcctggtgcaagacggcacactttattgctccagcatttttggttatcgcaatgtgcccgtcgtggacattctggctgaacttcctgcaccgcaaccacttttacgcctgacgatcgaccgtgccctgattaaaggcagtccggttttgattcaatggacgcctgcagcgggcagtagcaatgctggggtcatggagatgattaacatcgacttactgacggcaatgctgcttgagccacaactgccgcaaatcagtagcgccagcctgacggtggacaaacggcatttgctctatggtaatgggctggtagattcccttccgcaacctgaagacaatgaaaactatcaggtttctagccaacgctttccttttaccattaacgttaatggtccgggggctacggcgctggcatggcactatcttccaacacaattaccgctggcggtgctgctaagtttactggtgggctacatcgcctggctggcgaccgcttaccgaatgagcttttcccgcgaaatcaatctgggcctggcgcaacatgagttcgaattgttctgtcagcctttgcttaatgcgcgcagccagcaatgtattggtgtagagattttgctgcgctggaacaatccgcgtcagggctggattagtccggatgtgtttattcctatcgcggaagaacatcatttaattgtgccactgacccgctatgtgatggcagaaaccattcgtcagcgccatgttttcccgatgagtagtcagtttcatgttggcattaacgtcgcacccagccattttcgccgtggtgtgctgataaaagatctcaatcagtactggtttagcgctcacccgattcagcaactgatcctcgaaatcaccgaacgcgatgccttactggatgttgattatcggattgcccgcgagctgcatcgtaaaaacgtcaaactggcgattgatgacttcggcaccggcaacagcagcttttcctggcttgaaacattacgtcctgacgtgctgaaaattgataagagttttaccgcagctataggttctgacgcggttaacagcacggtgaccgatatcatcatcgcgctggggcaaagactgaatattgaactggtggcggagggcgtggaaacgcaagaacaggcgaagtatttgcgccgtcatggcgtgcatattttgcaagggtatttgtacgcacagccgatgccgctacgtgattttcccaaatggctggcgggcagccaaccgccgcccgcccggcataatggacatatcacgcccattatgccgttacgttaacgcttactcatcttcatcgtgcgccggttgctctttaacaatgcgaaccagatcaacacgataatcattggcttcaatgatggtgatatgcagtggccctacatcaatcacatcgcccacacggggaatgtgaccatttgcgctgatcacgaggcccgcgaccgtcgcgatatcatcgtcatcggcaaggtgctcaacatcaagcgcctgctgcaaggcatgcaaatctgtaccgccttttaccagccagccgtcaccatcagtaatgatttccggcgtttcgtcagcgtccgggaattcacccgcaatggcttccagcacatccagcggcgtgaccagaccttgtaccacaccaaactcgttggtcacgataacaaagctcccgcgagcacgacgcagcacgcccaacaggttgatcggatcgagggtttccgggacgataatcgccggagacgcgctagcaatcgccgccacatcaacgccctcttccagcgccaccagcagttctttagcacgtacaataccgatgatttcatccagttcaccgcgacataccgggaacagactgtgcggactagagagcagttgctcgcggatttcatcgaccccgagattagcgtcaacccagcttatttcaccgcgcggcgtcatgatcccgcgcagagaacggctcgccagcgtcagtacgccgttaatcatgtaacgttcttcttcggcaaatgcaccttccgggatcggcatcggcatcgggttatcggcatcgtgctgaacattggcctgacgtttcccgcccatcaaacgcaggatggcatcggcagtacgcgctcgcagcggcaaagtgctctggtggcgaataaagttgcgacgcgcaatctggttaaacacttcgatgatgatgctgaagccaatcgcggcatacaggtagcctttcggaatgtggaaaccgaaaccttctgccaccagactcagaccaatcattaacaggaagctcagacagagcaccaccaccgtggggtgctggttaacgaatcgcgtcagcggtttggatgccagcaacataaccgccatcgcaatcactaccgccgccatcatcaccggcagatggttaaccatccctactgcagtaattaccgcatccaagctgaagacggcgtcaaggatgacaatctgtgtgacgaccacccagaaactggcgtagcctttaccgtggccggaatcatgatcgcggttttccagccgttcatgcagttcggttgttgctttgaacagcaagaatatccccccgaacaacataatcaggtcgcgtccggagaaggagaaatccatgacggtaaatagcggtttggtcagcgtgaccatccaactaatcaggctcagcagccccagacgcataatcagcgccagacttaaccccagcaaacgcgctttatcgcgttgttttggcggcagtttgtcagcaagaatggcgatgaagaccaggttatcgatacccagcacaatttcgagaacaacaagcgtgagtagccccgcccaaatactggggtccattaagaattccatgacaagctcctgcttaaggaatagctattcgacgccagaaataatgcaggcgtaacgacaaaatgcaaacgaaaggtgcggcatagagtgccagaaaggcaggcgttaaaaggcctgatgctgaaatgacgtcggtgacgatccatactgcgggctactgccctatactccatggttgttaaacgggagttaaacatatcagagacgcctctgatttggcaaagatttaccttcctttgcaaacgaatgtgacaaggatattttacctttcgaaatttctgctaatcgaaagttaaattacggatcttcatcacataaaataattttttcgatatctaaaataaatcgcgaaacgcaggggtttttggttgtagcccttatctgaatcgattcgattgtggacgacgattcaaaaatacatctggcacgttgaggtgttaacgataataaaggaggtagcaagtgaccattgctattgttataggcacacatggttgggctgcagagcagttgcttaaaacggcagaaatgctgttaggcgagcaggaaaacgtcggctggatcgatttcgttccaggtgaaaatgccgaaacgctgattgaaaagtacaacgctcagttggcaaaactcgacaccactaaaggcgtgctgtttctcgttgatacatggggaggcagcccgttcaatgctgccagccgcattgtcgtcgacaaagagcattatgaagtcattgcaggcgttaacattccaatgctcgtggaaacgttaatggcccgtgatgatgacccaagctttgatgaactggtggcactggcagtagaaacaggccgtgaaggcgtgaaagcactgaaagccaaaccggttgaaaaagccgcgccagcacccgctgccgcagcaccaaaagcggctccaactccggcaaaaccaatggggccaaacgactacatggttattggccttgcgcgtatcgacgaccgtctgattcacggtcaggtcgccacccgctggaccaaagaaaccaatgtctcccgtattattgttgttagtgatgaagtggctgcggataccgttcgtaagacactgctcacccaggttgcacctccgggcgtaacagcacacgtagttgatgttgccaaaatgattcgcgtctacaacaacccgaaatatgctggcgaacgcgtaatgctgttatttaccaacccaacagatgtagagcgtctcgttgaaggcggcgtgaaaatcacctctgttaacgtcggtggtatggcattccgtcagggtaaaacccaggtgaataacgcggttagcgttgatgaaaaagatatcgaggcgttcaagaaactgaatgcgcgcggtattgagctggaagtccgtaaggtttccaccgatccgaaactgaaaatgatggatctgatcagcaaaatcgataagtaacgtattgtgttgattatcactcagttttcacacttaagtcttacgtaaacaggagaagtacaatggagattaccactcttcaaattgtgctggtatttatcgtagcctgtatcgcaggtatgggaagtatcctcgatgaatttcagtttcaccgtccgctaatcgcgtgtaccctggtgggtatcgttcttggggatatgaaaaccggtattattatcggtggtacgctggaaatgatcgcgctgggctggatgaacatcggtgctgcagttgcgcctgacgccgctctggcttctatcatttctaccattctggttatcgcaggtcatcagagcattggtgcaggtatcgcactggcaatccctctggccgctgcgggccaggtactgaccatcatcgttcgtactattaccgttgctttccagcacgctgcggataaggctgctgataacggcaacctgacagcgatttcctggatccacgtttcttctctgttcctgcaagcaatgcgtgtggctattccggccgtcatcgttgcgctgtctgttggtaccagcgaagtacagaacatgctgaatgcgattccggaagtggtgaccaatggtctgaatatcgccggtggcatgatcgtggtggttggttatgcgatggttatcaacatgatgcgtgctggctacctgatgccgttcttctacctcggcttcgtaaccgcagcattcaccaactttaacctggttgctctgggtgtgattggtactgttatggcagtgctctacatccaacttagcccgaaatacaaccgcgtagccggtgcgcctgctcaggcagctggtaacaacgatctcgataacgaactggactaacaggtgagcgaaatggttgatacaactcaaactaccaccgagaaaaaactcactcaaagtgatattcgtggcgtcttcctgcgttctaacctcttccagggtagttggaacttcgaacgtatgcaggcactgggtttctgcttctctatggtaccggcaattcgtcgcctctaccctgagaacaacgaagctcgtaaacaagctattcgccgtcacctggagttctttaacacccagccgttcgtggctgcgccgattctcggcgtaaccctggcgctggaagaacagcgtgctaatggcgcagagatcgacgacggtgctatcaacggtatcaaagtcggtttgatggggccactggctggtgtaggcgacccgatcttctggggaaccgtacgtccggtatttgcagcactgggtgccggtatcgcgatgagcggcagcctgttaggtccgctgctgttcttcatcctgtttaacctggtgcgtctggcaacccgttactacggcgtagcgtatggttactccaaaggtatcgatatcgttaaagatatgggtggtggcttcctgcaaaaactgacggaaggggcgtctatcctcggcctgtttgtcatgggggcattggttaacaagtggacacatgtcaacatcccgctggttgtctctcgcattactgaccagacgggcaaagaacacgttactactgtccagactattctggaccagttaatgccaggcctggtaccactgctgctgacctttgcttgtatgtggctactgcgcaaaaaagttaacccgctgtggatcatcgttggcttcttcgtcatcggtatcgctggttacgcttgcggcctgctgggactgtaagactgttgtacactaccggggccttttggccccgtttttttatctggaggattaatgacaatcacggacctggtactgattcttttcatcgccgcactcctggccttcgcgatctacgatcagttcatcatgccccgccgtaacggccccaccctgctggcaattcctttgctccggcgtggtcgcatcgatagcgttatcttcgtcggattgattgtcattcttatctataacaacgtcacgaatcatggtgcgttaataacgacatggttattaagcgcactggctctgatgggtttttatatattctggatccgcgttccgaagatcatctttaaacaaaaaggttttttcttcgccaatgtctggattgaatatagccgaatcaaagcgatgaacttgagcgaagatggcgtgttggtgatgcaattagaacagcgtcggctgttaatccgcgttcgaaatatcgacgatctggaaaaaatttataagcttctcgttagtactcaataagttatgaatttagccaaagctatgtttagtgtatttttaataatcagacatagcttaggctatattacctcttcccttatttgttatttattttaacgtttcattgatatataaatccaaatgaaaatcgttatcaataaagcaatgaaataatatattccaacagttgttttatattctcaaaatatgttaaggttgcgccctcatttggggagtagccgatttccagattccggaaatgtacgtgtcaacatactcgttgcaaaacgtggcacgtacggactgaatactttcagtcaggcgagaccatatgcacatcaatcgctatgcctgcatgaacgcgaaaaccatcacggcttgttgttcatgtatgcatgtttgctgggggcgatgatgtgttttatggataccccggtcaggacattgtcatgaatatcactgctactgttcttcttgcgtttggtatgagcatggatgcatttgctgcaagtatcggtaaaggtgccaccctccataaaccgaaattttctgaagcattgcgaaccggccttatttttggtgccgtcgaaaccctgacgccgctgatcggctggggaatgggcatgttagccagccggtttgtccttgaatggaaccactggattgcgtttgtgctgctgatattcctcggcgggcgaatgattattgagggttttcgtggcgcagatgatgaagatgaagagccgcgccgtcgacacggtttctggctactggtaaccaccgcgattgccaccagcctggatgccatggctgtgggtgttggtcttgctttcctgcaggtcaacattatcgcgaccgcattggccattggttgtgcaaccttgattatgagtacattagggatgatggttggtcgctttatcggcagtattattgggaaaaaagcggaaattctcggcgggctggtgctgatcggcatcggcgtccagatcctctggacgcacttccacggttaataagaacgctgccagaggtgaatattaaagtccgtctggcagtcgaacacttcttttgctgccagtgtttgccagacttctggcttcgcacgccaggcaaacggcgtcatctgcaataatgcgacggcttcatcaccgcgaagacgcatcggataacacaactccgcactctgctgtaatgtaaaaccttccagttgttctgcatgaggtgcatgaagatgtacttcattgtaaatcagccccttcagctccatcaaatgtcgcggtcccggcgtggcagtaatgacccagccgccgggcttcactactcgtgctaattcttctgctttacacggcgcgtaaatacgtattatggcgtccatactggtatcggaaaacggcaaacggtggctggaagcgacacaaaaagtgacctgcggatagcgtttcgccgccgcttttatcgctaccttgctaacatccagaccaaacgtggtgatttcgggcaacgcatcggcaaatgcgtgtgtgtaatacccttcaccacagccaatatccagcaccgccgtggccttatcatcaagccgttccctcagttgggcgacaattgcatcacgcagcggctgataatgtccggcatctaagaatgcgcggcgtgcttgcatcatttccgcgctgtcgcccggatcacgagaccgtttatgctgaacgggcagcagattgacatacccttctttcgccatatcaaactgatgtcgctggggacagatatagctgtttttttcacggctaagaggctgatggcaaagtggacaggaaaaagacatgacaactccggcaggatactaaaggccgcaagtgtaacgcgaatcacgcggcgggcaaatatccgaacgccaggagcgaagataaagcatagtaaaaagcctcgcattcgacgaggctttatagcgagattgaagcgtattcacacttcagatcagtggattcgatcagatagctgttacgttaacagctgccggacctttctggccgtcctgaatttcgaactcaacgttctgaccttcagccagagttttgaagccattaccctggatagcggagaagtgtacgaacacatctttgctgccatcagccggagtaatgaagccaaaacctttagactcgttgaaccacttaacctgacctttaatctttgccatttgaaaaattccttagattgttttcttcgcccgcaggcataacatagataaaacactcacattactgcaactggcaccaatataaggctcggcagagaagcggtattcaacgtcaacgtgtttactcaggacttctttactgaaaatgccacacataaacagaactgtacctcgtttaacccgaaatctgttatcacatacaacgttaattatggcaagccatttttaaacatgtctcgatcagacgcacaaatctcgatacgtcttccactttttttgcacacttatgcaacggaatacgcgccgatatatcattgtgcttaaccttgccagttcaggcagatacttaaactggcgtattttctaacatagttcaataagttcagttgttccaggccagtgggagaagttattacatagtgcgtgcaatatcacattttttgctatgcaatgaataaaaagttatatcactttttctcataaaacagtcagttaacggctattaattaccctaaagagaagtcaatccccaaagggattgtaaatttaaaataagaaaaattgatgaatgagcaaaaaaatcaagagagaaacgtttcgctaataaataataccacgcttaatcacaaatccgatgtaaacatcctaataaattaatggggtaaatatctttttctgatatcccgttacgcaaataaataatatgataattatttgaagtcagaccagagttttaatttgaagcagttgcaccatgacagtgcgtataatcaggatgaattgagtaacccttcaacgacggggttactcaagattgaggaaggattatcgttcggcgaccagacgaataatatcttcgtcttcaacgcttttttgactctcaacggtctttttatctgctttctctggttcgtttgcttcgcacaaacgacgtaacagtgcattttgacgtttttgctgatccagcaacgcctcaagcagttcaatctgttcgttagtccgactactggcacgattgataaaaaaccacaagatgagcccgataagaagaaccaccacgcttacaaccaaagacgcaatgttcatcacgccactatttacaacttcgttcatttcaccacctctgagtagaggcgctattctaccactgctggagaggaagaaaatctagtgctgaaaaaatgatatcaccacgggataaactggttaatggcacaaattccgctgaaaaattgtacatcctgatcgcacatcatgttgaatacctgcgcccaaagcagcaagcaagccaacaccacgacaaccagaacgacccatcgaaactttttcactccaatctccgtttcacctaccttatgtcattaaactagcatgcgttagttaaacagcgcctaactatgtcgatattcgtgctttttcggaatgagtcgcttgcttcagcgcatattgccgctacgattaagcgaacataaaaagagaagaggttgtaatgcgattcatcattcgcacagttatgctgatagcactggtatggataggattattactcagcggatatggcgttttgattggaagcaaagagaatgccgcaggattaggtttgcaatgtacctatctgactgccagaggcaccagcacggtacaatacttgcacactaaaagtggtttttttggggataacagattgcccgctgttacgcaaaagcaatatcgtggtcgataatggttaagggcaataaataaccagattctcactcctgagtaaaatactcttatagcaagcgcgtttaatataacgccaccttcaactttatttttctcatgctaaataaagaacctgtctgtttgatattccgacaggttcttactctcatcagaacggatagtcgtgataacccatttgggcagaaattttgcgcgctgcggtatgcaacattgcgacatattcctgtaaacgctcttcagagaaacgcaacgtcgggaaggagatgctcaaaccggcaatgaccacgccaaagcgatcaaataccggtaccgcaatgcatcgcagcccttcttcctgctcttcattatcttcgccatacccctgctcgcgcacctggtccagaacgggtaataacgcttctgtactggtgatggtccgctcggtactgcgtttatactccacgccctcaagaatttgcttcacttcatcgcgatcgcgccatgccagcagtaccttaccaatcgcggtgctgtacagcggattacgacgcccaatccgactatacatgcgcaaattgtacatagagtcaattttgtgaatgtaaacaatactgtcttcgtccagtgcgccgaggtggatagtttctttggtcaggcgggagagctcacgcatctggatatctgcgctacgaattaaatcgacgttttgtaacgcgcgagcgcccagttcaaacaatttcagggtcagggaatatttctcgctctccccttcctgcgccacataacctaaggttttcatggtctgtaaaaagcgataaacggtgcttttactcatcatgacgcgctggctcagctcggttatccctatttcgcgctcttcacccagcgcctgcaaaatgccaaaaacttttagcacggaagatacagaatcaggctgtttatccagatctgcgttagccatttatcacctcattgcgagtgttttataaaaatcagaactgttttttattataatttcgcaccagggtggtcgcaatccatcttttgccggttagttacaattctgcgacatccaccgtgaatatcagtgctagaatcatacccctgttgattattcaccaaagatataaaattcctatgccaaaagttcaggccgacggcctgccattgccccagcgatacggtgcgatattaaccattgtgattggtattagcatggccgtccttgacggcgcaatcgccaacgtcgccctgccaacaatcgccacggaccttcatgccacgccagccagttccatctgggtagtgaacgcctatcaaatcgccattgtcatctccctgctcagctttagctttctgggcgatatgtttggctatcgacgtatttataaatgcggtctggtcgtttttctgttgtctagtctgttctgcgccctttctgatagcctgcaaatgctcacccttgcgcgtgtcatacaaggtttcggcggtgcagcgttgatgagcgttaataccgcacttatccgcctgatctatccacaacgttttctgggtagagggatgggcataaacagctttattgttgccgtctcttctgctgccgggccgacaattgctgcagcaatcctctccatcgcatcctggaaatggttatttttaatcaacgtaccgttaggtattatcgccctgcttctggcgatgcgttttctgccacccaatggttctcgcgccagtaaaccccgtttcgacctgcccagcgccgtgatgaacgcgttaaccttcggcctgcttatcactgcgttgagtggtttcgctcaggggcaaagcctgacgttaattgctgcggaactggtggtaatggttgttgttggtattttctttattcgccgccagctttctcttcccgtaccgctgctaccggtggatttactgcgtatcccgctgtttagtctttctatttgcacatctgtttgctctttctgcgcacaaatgctggcaatggtttccctgcccttttacctgcaaaccgtgctcgggcgtagtgaagtcgaaacaggtttacttctgacaccgtggccgttagcaacgatggtgatggctccgctggcaggctatttgattgaacgcgtacatgcaggattgctgggggctttagggttgttcatcatggctgcggggcttttttccctggttctgctgcccgcgagtcctgcggatatcaatattatctggccgatgatcttatgtggtgctggatttggcttattccagagtcccaataaccacaccattattacctccgcgcctcgcgaacgtagcggtggagccagtggcatgttaggaacggctcgtctactgggtcagagtagcggcgcggcgctggtggcgctgatgctaaatcagtttggagataatggtacacacgtcagcctgatggctgcggctattctggcagtgattgctgcctgtgtcagtggtttacgtatcactcagccacgatccagggcataaaaaaagcgcgtcgatcaggacgcgctttttagtatttacttcatattacttcaggtattcacccgtacgcagagcttcaattcgtttatccagcggcgggtgggtcatgaacaactcactgaggcttttgctcttaccgttaatgcagagagccatcatgctggttgcttcttgcggttcatagctggttttcaggcgctgcagcgcggcaatcattttctcgcgaccaaccagttttgcgctaccggcatcagcatggaattcacgatgacggctgaaccacatggtgataatgctcgccagaataccaaacaccagttccagaaccgttgcaaccgcaaagtagatcagcgggttgccgttgctctcttcaccttcatcacgatttccgcccataaaacccgcggcaagctgcgccagaatacgggaaataaagataacgaaggtgttcaccacgccctgaatcagcgtcatggtgaccatatcaccattggcgatgtggctgatttcgtgagcaattaccgcctcggcttcatccgggctcatgttctgcagcaaaccggtgctgacagcaaccagagaggcatcacggcgcgcaccggttgcaaaagcgttgatgtccggcgcatggtagatagccacttgcggcatagcgatccccgcctgacgagcctgggttgctacagtattgaccagccaacgttccctttcgttacgcggttgctcgatcacttccccgccaacagatcgtaatgccatccatttggacatcagaaggctaacgaaggaaccaccaaaaccgaacagcaaggccatgatcatcagcccctgaacgctgctgctctgtatccctgtcaggctcagtaccagcccgaaaacgaccattacggccaggttcgttagcaggaagagcgcgattcgcatcataattttctttttacctcagtttaacaaaacgcaatatgcgatacccacatcgtatgggttacgcgactattttcaagtctggatagtgcgtaagtcaccagaaagacacaactttacattttgtagcatctgatttacggcatcttgtcgctgttaaaaaatcaggcacaatttcttgtgcctgattgatattacttgacgggagcgggttgttccgcgggtctggctttttcaagcttcgccagatcgagtgcgatattcaccgtctcatccagataaggatccggctcctggtaatctttcggtagatcatccagtttcttcaactccggtttaccttcgcgtttaaagcgttcgttcaaacgcgccagacgcgtcgcatcatcttcattattctctttctcacgcacagcgtaattcagagaaacgatattgcgcttgtccttcatagcgttgaagcgcgcgatatccttcatgatgttctggaactcaggatctttcgcgatacgcgcattatgttccttcagcagctccggttcaaaggccgttaaatctccacttttcacataagtcgcggcatcaatgctatcccacggcagcgcgttatcttcgaatttctcacccgtttccgtttcttcattacccgtcggcatgatgatgtctggcgttacgcctttacgttgcgtactgccgccgttaacgcgatagaatttctggatcgtgtactgcacagaacccagcgctggccattcaggacgtaacatctgatcgtaaatacggttcaaactacggtattgctgaacggtgcctttaccaaacgtcggttcacccacaaccagcgcacgaccgtaatcctgcattgccgcggcaaagatttcactagcgctagcactgaagcggtcaaccagcaccaccagcgggcctttatagaaaacctgtccgtcggtatcgctatcttcacgaaccttgccgttgttatcgcggacctgaacaatgggacccgcaggaataaacagaccggagaggcttacggcttcagttaacgccccaccgccattgctacgcaggtcgatgatgacgctgctgacattctgtttttccagtttctgcagttgcactttgacatcgtctgtcaaacccacatagaagcccggaatatccagcacgccgactttctctttaccgacggtcttcacgctcattttaaccgcgcggtcttcgagacgaatacgttcacgggtcaacgttacagtacgggtcttggtccctttaccagcaggtaaaatttccagacgaactttactgcccttcggccctttaattaaggcaaccacatcatcaagacgccagccaatcacgtcaaccatcggcttgcctgtttgaccaacaccgacaattttgtcaccaacgctgatagctttactcttcgctgccggaccacctgccaccatgctattgataacggtgtagtcatcatccatttgcagcactgcgccaataccttccaggctcaaactcatttcagtgttgaactgttcggtattacgcggggaaagatagttggtatgcgggtcgatttcacgcgcaaacgccgtcattgccaggctgaaaacatcttcgctgttggtttgcgccagacgacgaatggcaaatttgtagcggcgagtcagggtttcacgaatttctttatccgtttttcctgtcagcttcaggcttaactcgtcgaatttgactttactgtcccacagcgcgttcaactcagcctcgtttttcggccagggcgctttgctgcggtcaaggttataagtgtcgttgccggtgaaatccatcggcttttccagtacgctcaaagcgtactggtaacgctcaaaacggcgcttttgcgccagattgtagagatcgtagaaaacgtcgagtttgccactacgcagttcatcgcctaactcggttttctttttcgcgaactgttcaacatcgcttgccagcagcacgttgtggctgtaatcgagcagattcaggtagcggtcaaagattttggcgctaaatgcctgatcgaggtcgaactggcgataatgagaacgggtgaagcggctcgttacgcgctcacttaccgtcgcatgctgcgtctcttcctttaataccggaatttgatcagcacgcgtgatatcttctacagcgaaggtctggcctgctattgcaagcaggccagctaacgcggtaagcctaaaaaacatgttcatgcctggcccggcctccgtttcagaacaccaggtgttctgcgcgcacaatcaaagacataccgctattcagctggacgcggacgccgtctttggtgatttctaatacggtggcatccatcgcgttttgacccgctttcaccttcagggcttgtccgacagtcagagcactaatgtcagaaaccggggtgtgctgttcttcgcgaggtgcttttactgtttttggcgctttctctaccggcttttgcgcacgaggtttacgttcagcgccttctttgcggcgtggcgtagtcggacgtggcttgcgttcgcggcgcggtgcgtcttctttctcaccagcagttgcggcagcttcgcgttttttcgcttgttgttcagcacgctgtgcctgaacacgcgctttcgcttcttcaagctgcttgcgagcatgctctacatgttgctcgtccagctcaccgcatgggttgccgtcaagatcgacacgcgttgcgccgggtttaacaccgtaaagataacgccagctgctagtgtagagacgtaaagcggatcgcaattgcgttttgctcaggttcatttccccagcaacacgatcgaccaaatcctgaaaaataccgattttcagcggacgcgcttcaccttccgcactgaaacagtggggaaaacgttcggccagaaacgcgattacttctttactgctattcaacttaggttgattttccatgaaatttcctgattacaacggacgtagccaacaagcgcaggcatgaacaggcgtcattataatgacgctatcagtaaatgctacgttatccgttgattatcctgcgacgctcgcaaagaattttttgtaatccgtcgttgcaagcactttttcaagctgtgccacaagctgacgtaagccttgctcgtcctcgtctgtaaagcgaccgaagacggtactatcgatgtcgagaacaccaataatctgatttttcaccaccagcggcagaacaatttcagaattactcgccgcatcacaggcaatatgcccgtcaaacacatgaacatcctcgatacgctgcacttgattgcgggcaaccgcagtgccgcacacgccgcgcccgacgggtatccggacacaggcaattttgccctgaaatggtccgagtaccagtgtatcgtcctcaagcaaataaaaacctgcccagtttatgtcagtgagacgctcatataacaacgcactggtgttcgcaagcgttgccagaaaactggtttctcccgccatcagcgcgttaaagtcgcgatttaaatccgcgtaaaattctgttttgttcattatataatcacttggttgtcttacctggatctgccagcctattaaaataagcattaaatgcgttaatgctcaagatcattcccatcatgggttaagattaatgttaattcttattacatttggcacgtcatggctcttaacacaccacaaattacgccgacaaaaaagataacagtgagggcaatcggcgaggaactgccgcgtggtgattaccaacgttgcccgcaatgtgacatgctgtttagcctgcccgagataaattctcatcaaagtgcctattgtccgcgctgtcaggcaaaaattcgtgacgggcgcgactggagcctaacgcgcctggcggcaatggccttcaccatgctgttgcttatgccgtttgcctggggcgaaccgctgttgcatatctggctgttaggcattcgtattgacgccaacgttatgcaaggcatctggcaaatgaccaaacagggcgatgcgataacggggagcatggtctttttctgcgttattggtgccccgctcattctggtgacctccatagcttatttatggtttggtaaccgactgggaatgaatttacgtccggtactgctgatgcttgagcgacttaaagagtgggtaatgctcgatatctacctggtcggcattggcgttgcttctataaaggtacaggattatgcccatatccaggctggtgtcggcttgttctcttttgtggcgttggtgattttaacgacggtgacgttgagtcatcttaatgtcgaagaactgtgggagcgattttatccgcagcgccccgctacgcgtagggacgagaaacttcgtgtctgtcttgggtgccattttaccggctatccagatcagcgtggtcgctgcccgcgttgccatatcccgctacgcctgcgtcgccgtcatagtctgcaaaaatgctgggcggcgctgttagcgagtatcgttttattgttacctgccaacctgttgcctatttctatcatttatctgaacggaggacggcaggaagatacaattctttccggaattatgagcctggcaagtagcaacattgcggttgcaggaatcgtgtttatcgccagtattctggtaccgtttactaaagtgatcgtcatgttcactttactgttgagcattcattttaaatgccagcaaggtttacgcacacgcattctgttactgcggatggtgacctggattggtcgctggagcatgctcgacctgtttgtcatatctttaaccatgagcctgattaatcgcgatcagatcctcgcttttactatgggaccggctgcgttttatttcggcgcagcggtaattttgactattcttgctgtggaatggctggacagccgcttactttgggatgcacatgagagtggaaacgcccgcttcgacgactgaataaccgcttactttgggatgcacatgagtcaggaaacgcccgctagcacgactgaagcgcagattaaaaataaacgccgtatcagtcctttctggctgctgccgttcatcgcgctaatgattgccagttggctgatttgggacagttatcaggaccggggtaataccgtcaccatcgactttatgagcgcggatggtattgttccaggccgtacgcctgttcgttatcagggcgttgaagtcggaacagtgcaggatatcagcctcagcgacgatcttcgtaagattgaagtcaaggtcagcatcaagtccgatatgaaagatgcgctgcgcgaagagactcagttctggctggtgacgccaaaagcaagcttggcaggtgtctccgggctggacgccctcgtcggtgggaactatatcggcatgatgccgggtaaaggtaaagagcaggatcactttgtcgcactcgatacccaaccgaaatatcggctggacaatggcgatctgatgatccacctgcaagcccccgatctcggtagcctgaacagcggtagtttggtctatttccgcaagatcccggtgggaaaagtctacgactatgccatcaatcccaacaagcaaggcgtggtgattgatgtcctgatcgagcggcgttttaccgatctggtgaaaaaaggtagccgtttctggaacgtttccggcgttgatgccaacgtcagtatcagtggcgcgaaggtgaaactggaaagcctggcggcactggttaacggtgcgattgccttcgatagtccagaagagagcaaacctgccgaggcggaagatacctttggtctgtatgaagatctggcccacagccagcgtggcgtaataataaaactggaactgccgagtggggccggattaaccgccgacagcacgccgttaatgtatcaggggctggaagtcggacagctgactaaactggatttaaatcctggtggtaaagtcacaggggaaatgaccgttgatcccagcgtcgttaccctgcttcgtgaaaatacccgcatcgaattacgcaacccgaaattatcccttagcgatgctaatctcagcgccctgctgaccggcaaaaccttcgagctggtgcccggcgatggcgagccacgcaaagagttcgttgttgtgccaggcgaaaaagcactgctgcatgaacctgatgttctgacgctgaccctgaccgcgccggaaagttacggtattgatgcgggtcagccgctcattcttcacggcgtgcaggtaggccaggttatcgatcgtaaactcaccagcaaaggcgtcacctttaccgtcgccatcgagcctcagcatcgcgaactggtaaaaggcgatagcaaatttgtcgtcaacagccgtgtcgatgtgaaggtggggctggatggcgttgagtttctcggtgccagcgccagtgaatggatcaatggcgggatacgtattctgccgggcgataaaggtgagatgaaagccagctatccactgtatgccaatttggaaaaagcgctggagaacagccttagcgatttacccaccacaaccgtgagtttgagtgcagagacgctgccggatgtgcaggcaggaagcgtagtgctgtaccgtaaatttgaagttggtgaagtgattaccgtgcgtccgcgagctaacgcgtttgatatcgatctgcatattaagccggagtatcgcaaccttctgaccagcaatagcgtgttctgggcagaaggcggggcgaaagttcagctgaatggtagtggtctgaccgtacaggcatccccgctctccagagcattaaagggagccattagcttcgacaacctcagcggtgccagcgccagtcagcgtaaaggcgataagcgtattctgtatgcttccgaaacagcggcccgtgcggttggcgggcagattacgcttcacgctttcgatgccggaaaactggcggtcgggatgccaattcgctatctcggtattgatatcgggcaaatccagacgctggatctgattaccgcacgcaatgaagtacaggcaaaggcggtactttacccggaatatgtccagacctttgctcgcggtggtacgcgcttcagtgtggtcacaccgcaaattagcgcagctggcgttgagcatcttgatactatcctccagccgtatatcaacgtcgaaccaggccggggcaatcctcgccgcgactttgaattacaagaggccaccattactgatagccgttacctggatggcttaagcattattgttgaagcgccggaagccggtagcttaggcatcggtacgcctgtgctgttccgtggtctggaagtcggtacggttacaggaatgacgctggggacattgagtgatcgcgtgatgattgcgatgcgcatcagtaaacgctatcaacacctggtgcgtaacaattccgtcttctggttggcaagcggttacagtctggactttggtctgacgggcggcgtagtgaaaaccggcacctttaaccagtttatccgtggcggcatcgccttcgccacgcctccgggtacgccactggcaccgaaagcccaggaaggcaaacacttcctgttgcaggaaagtgaaccgaaagagtggcgtgaatggggaactgcgcttcccaaataatgcccactgctccggcgtgcctgcgccggagcgtttatgctaaactgcgcgcctgtttttttgccagtggtacatgctcgtggcccaacacaccgtttatttcccggacgcctttctgacacaaatgcgcgaagcgatgcctagcacgctcagttttgatgattttcttgccgcctgtcagcgcccgttgcgccgcagcattcgcgttaatacgctgaaaatctccgttgctgatttcctgcaattaaccgctccttatggctggacgcttacgccaattccgtggtgtgaagaaggtttctggattgaacgcgacaatgaagatgcattgccattgggtagtaccgccgagcatttaagtggcctgttttatattcaggaagccagtagtatgttgcctgttgccgccttgtttgctgacggtaatgcaccacagcgggtgatggatgtcgctgccgcgcctggctccaaaacgacgcaaatttccgcgcggatgaataacgaaggggcaatccttgccaatgagttttccgccagtcgggtaaaagtgttacatgccaatatcagccgctgtggtatcagtaatgttgcgctcacacattttgatggccgcgtgtttggtgcggcagtgccagaaatgttcgatgccattttgctggacgctccctgctctggcgaaggcgtggtgcgtaaagatcccgatgcgctaaaaaactggagtccagaaagcaatcaggaaatcgcagctacacaacgggagcttatcgacagcgcctttcatgcattacgtcctggtggtacgctggtttacagcacctgtaccttaaaccaggaagaaaacgaagccgtttgcctgtggctgaaagagacttaccccgacgcagtagagtttttaccacttggcgatctcttccctggtgcaaacaaagcgctgaccgaagaaggctttttgcatgttttcccacaaatttacgactgcgaaggcttcttcgttgctcgtctgcgtaaaactcaggcgattcccgccttacccgcccccaaatacaaagtcggtaattttccgttcagcccggtgaaagatcgcgaagctggacaaattcgtcaggcggctacaggtgttggcttaaactgggatgaaaacctgcgcctctggcagcgtgacaaagaactgtggttgttcccggtgggcattgaagccctgatcggtaaagtccgattttctcggttggggattaaacttgccgagacgcacaacaaaggttatcgctggcagcatgaagcggttattgctcttgccagtcccgataatatgaatgcattcgagctgacaccgcaggaagcggaggagtggtatcgcgggcgcgatgtttacccgcaagccgcgccagtggcggatgatgtattggttactttccagcatcaaccgattggtttagccaaacggattggtagccgattgaaaaacagctatccgcgtgaactggtgcgcgatgggaaactttttaccggtaacgcctgacagcgcacaaaaaaagcgcactttttgactggcacattcggctgcctcaactaggctgaaaaatggtgcgatcggactggtcgtaccacaatcggcagctaaatggagagcacgaagatgaaaaccagtgtgcgcataggcgcttttgaaatcgacgacggcgaattacacggtgaaagcccaggtgatcgaacgttaaccattccttgtaaatctgaccccgatttatgtatgcaactggatgcctgggatgctgaaaccagtatccctgccctgctaaatggcgaacactctgtcctttaccgtacccgttacgatcaacaatctgatgcctggattatgcgtcttgcctgatccaaaaagaacccgtcggcatggcgggttatttgtcctggttattcccccgttgtaaaatctctcctaaacttaacggtacggcaccacacttcggggatgaaatgttcgcgctggtactttttgtttgctacctggatggcggttgtgaagatattgttgtggatgtctacaacacggaacagcagtgtctttattctatgagcgatcaacggatccgccagggcggttgttttccgattgaggattttatagatggtttctggcgacctgcacaggagtacggtgatttttaattattgcaattgcacaagagtcagttcgcccccaaagacagcaccggtatcaatataatgcaggttgccaatatccacgcgatgtcgcaacggtgtatgaccaaaccagaaatgatcagcacctgtaattccctgccctttttggcgttcacctaatcggctgcggctccacaagacctgatgcaaatcaacgtccttttgccattcataaacatcatctggataatcggcatgagcaataatatgcttgccggtgcgactgtgtacttcaagaataaagggcaaatgctgacatttttccagcgccgttttcgcttgtttctgttgattatctgccagcgcaataaaccagtcgccgccattcatcaaccacaaagacatctgctgggatgccagcgcatccatcgccatctgttcatgattgcctcttaccgcacaaacccaatgttgttccagtaactgcagacaacgtaaactttgcggcccacgatcgataacgtctcccacactgataagtaaatctcgccacggatcaaaacgacaatgccataatttgcggcgcaactgctcaagacaaccgtgtatatcgccagaaagccagatatgtcgccattgatgacccgcaattctctgataaacgggcgcaggctgtttcatcaatattttcctcccgcgctaaagatcacataatcttaacaagaatgttaaaaaacgctggactcagacagtagagtgtgtgttatggttgactataaagtcagcgaaggaaatgcttctggcttttaacagataaaaagagaccgaacacgattcctgtattcggtccagggaaatggctcttgggagagagccgtgcgctaaaagttggcattaatgcaggcttagttgccttgccctttaagaatagatgacgacgccaggttttccagtttgcgtgcaaaatggtcaataaaaagcgtggtggtcatcagctgaaatgttaaaaaccgcccgttctggtgaaagaactgaggcggtttttttattggaaatcaaaaggctattttaggtaattaacagagtttttcagctcgttctataaacggtgccagactcattttttcgccgggattgttaggatcatcaatctgaatcacgctaatgggttgggcattggtcttcccactggcaacttccttttgtgcgatatcgtttaaaggatactgcacgagggtactcggattaataacatacaaagcattacccggtcggcaagtcagcatcacctcttcgcgattaaacgcccatttgtctttacccacttcaaaacgactgacggtaatcacctgcggtgcagccagcgccgctgcagaactggtgagtaacagaaacgccagaatactttttttcatcattttcgtaatccatcaaaaaggttcgagagtcgcaagcaggctgatgatcaccagcactaccgcacctatcgcccattcgagtttagtcatccacacaaaccagggtgccgcacgatcttcatcctgcctcatgcgcggtacaagaacataacgattagccagcgcaatgaccaccataatcatcaccaggatggctttgagcaataagagttggccccagtaagtcgtaagcgtggggggaaatccggtaatcaacaatgcattaagcacgccgcttgccagtacgccgatcaccgcaaaatgcccgcaccaggaaaaacgcatcagcgcctgaatagcctggtgtcgccaacggcctttgatgagttgcatacaccagagcaccggcagtaatcccccaaaccacgccgccgcacaaatcaggtgaatcgcgtgattagtctgatggattttcgctgttaccccttcattcagcgtcgcatgccccactcccgccagcagaataaattgcgcggtagtgagcataaacagcaaacgtggcatattccgcggttgcataagggcgacgatcaacgttacgagggcgagaacaatttgccataaccagatgccaccaaactgcgtttgcaaaacagcctgccaaatgtttgggctaaatacatctgtccatcccgttcccatcaacccgccctgaacggcgagcattgcagtggcactgatcaaactccagacggcagcgtgctgttgtaaacgcagaaaacgcttcgccagcaagcgacgaatcgtcaagggggccagccaggcaccgtacattgcgaagccaaaaaccagcatcaggctggtgaaatggataaatcgcagcgcgatccaggtaaacgccagcatgatttatttcacgctaaaggtgtagtgtcctttcgttttatgcccgtccacgctaacaacatgccagtcaacggtgtaggttccgggtttcaggctatcggccagtggaacaatcagttgcttttggtcctgctcatttcgcttcgccggtaatgttttaatattttcgttttttggccccgtgatttttgcaccactgaatcctgtttcaacaccttcgctgaagtttaaagtgattgcctgcggtgcagctgtcacttgcgcgtttgccgcaggatactgatgcgttaaatgcgcatgtgcccagacggaaggtgtcaccaagctagtggtcaggattgccagcgcgtagcgaagggagcgtgcagtactagccatattatctattcctttttgtaataacttttttacagagcataaccttgtctaatgtctgagtcgaggatcatcaattccggcttgccatcctggctcactcttagtaacttttgcccgcgaatgatgaggagattaagaatgctgaagaatctggctaaactggatcaaacagaaatggataaagtgaatgtcgatttggcggcggccggggtggcatttaaagaacgctacaatatgccggtgatcgctgaagcggttgaacgtgaacagcctgaacatttgcgcagctggtttcgcgagcggcttattgcccaccgtttggctagcgtcaatctgagtcgtttaccttacgagcccaaacttaaataaaacttatacagagttacactttcttacataacgcctgctaaattatgagtattttctaaaccgcactcataatttgcagtcattttgaaaaggaagtcattatgagcttctggaaagttgcagcagcgcaatatgagcctcgtaaaaccagtctcaccgaacaggtagctcatcatctggagtttgtgagggccgccgccaggcaacaatgtcagctgttagtttttccaagcctttctttactggggtgtgattatagccgacgtgcccttcctgccccacccgatctcagtctgttagacccgctttgttatgccgcaacgacctggcgaatgaccatcattgccggccttcccgttgaatataacgatcgctttattcgtggaattgcggtgttcgcaccgtggcgaaaaacgcctgggatctaccatcagagtcatggtgcatgtctgggccgtcgttccagaaccatcacggtggtcgatgaacaaccgcaaggtatggatatggacccgacctgtagtctgtttactacagggcaatgtctgggagaacccgacctgctggcgagcgcccgtcgcttacaattttttagtcatcagtacagcattgccgtgctgatggcaaatgcccgtggtaacagtgcactatgggatgaatatggtcgtctcatcgttcgcgccgatcgtggtagtttattgttagtcggtcagcgtagtagtcagggttggcaaggcgatatcattccattacgctaagctttttcggcctggagcatgccatgttgcgcattatcgatacagaaacctgcggtttgcagggagggatcgttgagattgcctctgttgatgtcattgacggaaaaatcgtcaaccccatgagccacctggtgcgccccgatcgtcctattagtccacaagcgatggcgattcatcgcatcaccgaagccatggtcgccgataaaccgtggattgaagatgtgatcccacactattacggtagtgaatggtatgtcgcgcataacgccagctttgaccgccgcgtactgcctgagatgcccggtgagtggatttgcactatgaaactggcccgtcgtttgtggcctgggatcaagtacagcaatatggcgttatataaaacacgcaagctcaatgtacagacgccgccgggcctgcatcatcaccgcgcgttgtatgactgttatatcaccgccgcgttgcttatcgatattatgaacacctccggctggacggcagaacagatggccgatatcaccggacgtccgagcttgatgacgaccttcacctttggcaaataccgtggcaaagcggtttccgacgttgccgaacgcgatccgggctatctgcgctggttatttaataacctggacagcatgagcccggagctgcgtttaacactgaaacattatctggaaaatacttaatccgcaggcgtagcgggtaatgttccctgcgccagcgcgaccagaaaagcatattccatcgctacgccttcgtagcttttaaagcgaccagatttaccgccatggccactgtccatgtcggtacagagcaataaaagatggtcatcggttttcagctcgcgcaatttagcgacccattttgccggttcccaatattgcacctgagaatcgtgcaaaccggtcgttaccagtaaatgcggataagcctgtgcggtgacgttgtcatacgggctgtagcttttcatgtactcgtaatattgcggatcctgcgggttaccccactcttcaaactcaccagtggtaagaggaatactttcatcaagcatcgttgttacaacatcaacaaacggtacctgggcgataacgccgtggaataattccgggcgttgattaattgcaacgcccatcaacatgccccccgcactcccgcccatcgcataacaaaggctaggagagccatagcccagttttaacaatgcatcgcaggcatcaagataatcattaaacgtatttttcttcttcagaaattttccgtcttcgtaccattgttgccccagctcaccaccgccgcgaacatggacaatggcgtagacaaagccacgatctaacaaactcaagcggctaaaactgaaatcggcatcaatacttgcgccgtaagaaccatagccatacaccagcaacgggttgtgtcctttgcgaaaatgtttgcgatggtagaccaagctaaccggaacttcgacgccatcacgggcgactatccacaggtgttcactgcggtaattcgccgcataaaaaccaggaacttccgtttgttttaatacacgacgctcaccggtatccatatccagttcaaacaaagtgtctggtgtagtcatggaagaataaccataacgcaatcgcgcggtttcaggttctggattgtaggcaatccaggtcacataggccggatcatcaaaggcaataccaatgacttcccgggtcttgcggttaatttggcgcaaactggttaacccgcgctgacgctcttcaaccaccagccagtcggtaaacagcgtaaacccttccagcatgatgttttcgcgtggcggaattaactcttcccactgttgctcatcacgcatacgggtacggtataagccaaagtttttgccgtggcggttggaacgcagataaaaacgatgctggtagtgatcaaggctgtattcgtgatctttgcggcgcggcagaaaaacaaacggctcggcatcggccatttccgcgtccagcaggcgaacttcactggtggtggcgctggccaaatgaatgactacatagtgcttgctggtcgttttatgcaggctgacgtaataggtatcgtctttttcttcgtagatcagtttatcttggcttgctggcgtaccgatggcgtgacgccagacctgataaggcagcagcgtcaccggatgcttgcgaacatagtagaaaatccaggagtcatttgcccagacaaagctgggttcaacgttatccagcagttccgggtaccagttaccagtttccagattacgaaaacgaatgccgtactggcgtcgggaaagaaaatcttctgccagcgccataatggtgttatcgggcgtaatcgccattccgcccatgctataaaactcactatgagctgcgcgcttattggcatcgagcaatgtttcccactcatcccactcttcactgaatgcgctttgacgctggtagatagcatattcacagcctggttcataaatatgccgatagcggtagccatttttgatgtagggcgcagaaacttctcgttgcggaatgcggtcgatgatttcctttaagatgcgatcctgcaaggcttgttgactggccatcacccgatgaccgtaactattttcttgttgcaggtagtccaggacttctggctgagaacgcgtatcgtcccgcagccagtagtaattatcgatgcgcgtatcgccatgaagcgtcatggcgtggggaatgcgggcggcttttggtagcatgttattgttctttctggttgaaacatcttataagggtggcaaaactcaccggggatgcaagcgaaacaggggagtcattgcttagatgatgacaggtaatggcgcggatatcgaatgttatgcagacagagaaaatcagcctgttcaaatggctgtgcgattctggatagcccgaaatagtcaacttcaggctatccagagagcggaattattccgccaaagtgcgtttttgctgttcgagatcgcgttcaatgccgtcacgaacatcctgggggattttcagcgcgtcacccagtgcattcaggtaactgcgttccataaaatggtcaatatcaatagccgcgcaactcaggaaatagatttccagcgcctcttcttcattgcggaccccggtagccaggcgttgtggatccagcggttgttcgattgcctgctcaatgagtacacgcccctgctcttccacgccggctccacgcaattgctggtcgattgccgcacgttctttggcatcaatatgaccatcacttttagcggcaaagaccagcgcaaggatcaaacgtgctgtacgctcatccagcggcgtactttgcgcgccaaactgcggttcgtcctgatgcgccgcgcgaattttatctttgtatttattccacagcaccgtacccgctaccgctccgccgccaaccagtaacgcgttggtgccatatttcgtaagaagtttacgtgcacttttatttgcgaccagcagcccagccagtccgcctaatgcgcctggcactaacagtttgaccaatccctgatccgcagagctggaggtagaagaactgctttgcccaagcagggattgcagttgatttaaccagttagccatatttgctcctcaataaccatttttagtgcctgtagcatagcggatgaggatgtcagaaaatgtatatcgagacaaaagatgcgcaaataagcggggcggtaggccgttattcaaagaaattcgcgccaggtaaggtatttactgtatatcaggtgataagggtattttaggtgaaagtagtttgtcgttttgagtggcattgtttgatgctgattgcccgatgcgacgctgttgcgtcttctcaggcctacgattgtggtgcgttctggggcggacaaggcactcgcgccgcatccgccaacagtcaatcgaattatcagaagccattaacgccgctgatattccgccattcccgctttgcagtccacgctgacctggtaatgaatatcggcacttttaccacgcacggttagcggtacactccatttatcatctttaccctgaatgtcctgcaaactgacccaagccacgggatcggcctgaccgacaattttttgatcatctgcccaacgcgccacgcgattttgttgataatcacgttttacgctcgcggcaattccggcagcatccagatcttcacactttgggaaagtgacgctcttgctggtttcattattggcagcgaaaacacttgcgcaggcagaaaccaacaacagccctaaaaacgcccctctttttttcatgtttttctccatagcacaatgattcaggagaaagcatggtacaaattgtcaggagcgcaagttgcttcaggccgcgtgactggcatcttcctcttcggattcagcaccgacgacctgtggggacggtaatttgccggttttcagaatggtgctcagcacatctttttgttctgccagccataggctaagggcttcacgttgctcgtcttccatttgcactggagaatttgtcagccaggtgtcaagcagatccgccgtatcaagcattttgtcataagcatcggcttcctttttgctggtaaagctcattttctcttcgccctcacgaatgactacgtatttaacttcaaccgccatttgcagcctctcataataactgtgattttatacagtatatttcttttcggttgagaaatcaacatcagcaataaagacacacgcaaacgttttcgtttatactgcgcgcggaattaatcaggggatattcgttatgacgttattaggcactgcgctgcgtccggcagcaactcgcgtgatgttattaggctccggtgaactgggtaaagaagtggcaatcgagtgtcagcgtctcggcgtagaggtgattgccgtcgatcgctatgccgacgcaccagccatgcatgtcgcgcatcgctcccatgtcattaatatgcttgatggtgatgcattacgccgtgtggttgaactggaaaaaccacattatatcgtgccggagatcgaagctattgccaccgatatgctgatccaacttgaagaggaaggactgaatgttgtcccctgcgctcgcgcaacgaaattaacgatgaatcgcgagggtatccgtcgcctggcggcagaagagctgcagctgcccacttccacttatcgttttgccgatagcgaaagccttttccgcgaggcggttgctgacattggctatccctgcattgtaaaaccggtgatgagctcttccggcaaggggcagacgtttattcgttctgcagagcaacttgctcaggcatggaagtacgctcagcaaggcggtcgcgccggagcgggccgcgtaattgttgaaggcgtcgttaagtttgacttcgaaattaccctgctaaccgtcagcgcggtggatggcgtccatttctgtgcaccagtaggtcatcgccaggaagatggcgactaccgtgaatcctggcaaccacagcaaatgagcccgcttgcccttgaacgtgcgcaggagattgcccgtaaagtggtgctggcactgggcggttatgggttgtttggtgtcgagctatttgtctgtggtgatgaggtgattttcagtgaggtctcccctcgtccacatgataccgggatggtgacgttaatttctcaagatctcagtgagtttgccctgcatgtacgtgccttcctcggacttccggttggcgggatccgtcagtatggtcctgcagcttctgccgttattctgccacaactgaccagtcagaatgtcacgtttgataatgtgcagaatgccgtaggcgcagatttgcagattcgtttatttggtaagccggaaattgatggcagccgtcgtctgggggtggcactggctactgcagagagtgttgttgacgccattgaacgcgcgaagcacgccgccggacaggtaaaagtacagggttaaacccggcaaaaaaacgctacaaaaatgcccgatcctcgatcgggcattttgacttttacagcttagcgccttctacagcttcacgcgccagcttagtaatgcggtcgtaatcgcccgcttccagcgcatctgccggaaccagccaggaaccaccgatgcacagcacgcttttcagcgccaggtagtcacggtagttagccggagaaataccacccgtcgggcagaaacggacctgggagaacggacccgcgatcgcctgcagggctttcacgccgccgttagcttcagccgggaagaatttgaactctttcaaaccgtagtccatacccagcatcagttcggaaacagtgctgatccccggaatcagaggaatagtcccttcggtagcagctttcagcagcggctcggtcagacccgggctaattgcgaactgtgcacccgcttcagtgacttctgccagctgctgtggattcagcaccgtaccggcacccacaatcgcttcaggcacttctttggcgatagcacggatagcgtcaactgcacactcggtacgcagagtcacttccagaacgcgcaccccaccagcaaccaacgcttttgccatcggcaccgcgtgttccagtttttttaccacgataaccggtacaaccgggccggtggtcaggatactttctgcacttgttttccagtttttcatcagagttttctctcgcctgattacaaatttgtcgtcttaaaaagtgatacaggttgcgccctgttcggcaccggacagtttttcacgcaaggcgctgaataattcacgtcctgttcccacgcgactcgcgctcaggtcaggaatgtgcggttcgcgagcagccagttccgcttcgtctaccagcagcgtcagttcgcctgtctgtccattcacacgaatgatgtccccgtcgcgcacttttgccagcagcccgccatcgtaggcttctggtgttacgtggatagcactcggcactttaccactagcgccggagagtcgtccatcggtaactaacgcaattttgaaacaccggtccaataatacaccaagtggcggcatgagtttatgtaattctggcattccgttcgcttttggcccctgatgacggacaacaacgacacaatcgcggtccagcaaacccgcttcaaaggccggcataacgtcatgctggctttcaaaaacaaccgctggcgcttcaatcacctggttctcaaccggcacggcagaggttttcataaccgcacggcccaggttaccgcttaacacttttgtcccaccatgatgagagaaaggttgttcgaaggaagcgatcacattgctgtcgagacttttttccgccccttcccgccagtccagttcaccattattcagccatggttcaagggtataacgagacagaccaaaacctgccaccgtattgacatcttcatgcagcaggcctgctttgagcagttcacgcaccagaaccggtacgccacctgccgcctggaagtggttaatatcggccggaccgttcgggtagagacgtgccatcagcggtacaacatcagaaaggtcagagaagtcatcccagttaatctgaataccggccgcgcgcgccatcgccaccaggtgcatggtgtggttagtggaaccaccggtcgccagcagtgcaacgataccgttcaccaccactttctcatcgatcatcttaccgatcggcatccattcattaccattaccggtcatgcgtgtaacctgacgcgcagctgcggcggtcaaagcatcgcgcagcggagaatccggatgaacaaaagaagagcctggcaactgcatccccataaactccaccaccatctggttggtgttggcagtaccgtagaaagtacatgttcccggcgcatggtaagacgcggcttcactctccagtaaggccatgcggtccactttaccttcggcataaagctggcgaatacgcactttttctttatttggcaaaccgcttgccatcggtccagacggcacaaacaccgcaggcaaatgaccaaagctcagggctgccatcgtcagacccgggacaatcttgtcgcacacaccgaggaacagagcaccatcaaacatgttatgggacagccccaccgccgcagacatcgctatcacttcgcggcttagcaggctcaattccattccatcctgcccctgggtgacaccatcacacatcgccggaacaccgcccgcaacctgaccaaccgcattcgcttcatgcagggctttacgaatgatttctggatagtgttcataaggctggtgcgcggagagcatgtcgttataggaggtgatgatggcgatattgttacgcaacatgcttttcaaagaggctttgtcttctggctggcaggcagcgaaaccgtgtgccaggttaccgcatgccaactggctacgatgaacggtgctagttttcgcttgttctatccgggcgagataagcagagcgagtctcgcggctacgttcaatgattcgatttgttacgcgtaacaattgtggattcataaaggctcctgaaattgagttgtcagagcaggatgattcacaacgcgtttcattcagaggatttatgactgaaacgcctgtaaccggagctcatagggcaaaaacgtttcagtcagtgtaataaaaaaagcctcgtgggtgaatccgcacgaggcctgaaagtgtaaaaattgttctacaatctgcgcaagatcatgttaccggtaaaataaccataaaggataagcgcagatattactcaaactcattccaggaacgaccatcacgggtaatcatcgccacgctggcaacgggtccccaggttccggcctgatacggtttcggcgcatcattgtccatcgcccacgcctcagtaatggagtctacccatttccaggcttcttccacttcgtcgcgacgtacaaacagtgcctgaataccacgcatggtttccagcagcaaacgttcataggcatccgccagatgcgtctgattaaaggtttcactatagctcagatccagcttggtgatttgcaggttatgtttgtggtcaaggccaggaactttattcagtacctggatatccacgccttcatcaggttgcagacggatagtcagtttattctgcggcagatcctgccagctttctttaaacagattcagttcaggtgttttgaaatagaccacgacttcagaacatttggtcggcagacgtttaccagtacgcaggtagaatggcacaccggcccagcgccagttatcaatgtcgacgcggatcgccacgaaagtttctgtattgctgctcttgttcgcgccctcttcttccagatatcccggcacttttttgccctgggcgaagcccgcagtatattgcccgcgtacggttttttcgcgtacgttggagcggtcgatgcggcgcagagacttcagtactttcactttttcatcgcggatgctgtctgcgctcaggtcagacggcggagacatcgcaatcatgcaaagaatttgcagcaggtggttctggatcatgtcgcgcatctgaccggctttatcaaaatagccccagcgcccttcgatccccacttcttctgccacggtaatctcaacatgatcaatggtgcgattgtcccagttattcacaaacagggagttagcaaaacgcagcgccaacaggttcagcaccgtttctttaccaagatagtggtcgatacggtaaacctggcactcctcgaagtattcgccaacctgatcattgatttcctggctggtcgccaggctcgtccccagcggtttctccatgactacgcgtgccggtttagcattcagttttgcctcgccaagccctttgcaaattgcgccaaaagtgctgggcggcatggcaaagtagttaatggtgatacgatttttttgatccagcatcgcgccgagacggctgaatgcagcagtgtcattgacatcgagattacaaaaatccagacgtgcactcagggtgtcccataaaccttcatcaatggtttctttcatgaaagtttcgagcgcctcgcggacaactttggtatatgccgctttatcccagtcagcacgccctacgccgataatccgggtgtccgggttgagctgaccggctttttccagttgatacagggaaggcagcaatttacgacgcgcaaggtcgcctttcgcgccgaaaatgaccaggtcacaggcctgggctgtttgcgttaccgccatgtcattctccttaagttaactaacccggtacttaagccagggtatacttgtaattttcttacggtgcactgtactgcttttacgagcttgcgaaaactgtaaacgcttatccacccgtgcgattacgggaaaagcgcgcaaagtgcggcaaaactgataaaaaaatcatcgttttccattgggtaaaaatctgacactgatcatgttatgaaaaaaaataacaacttttttatctgcttttgtcattaacacggcacacaggcgtaatatctgacaaaactgcatttcgatttctttcagtgcggaaatcgtcattacccgtgagtctctttacatcatgaatatgctggaaaaaatccagtctcagctggaacatttgagcaaaagtgagcgcaaagttgccgaggtcattctggctagccccgataacgcgatccatagcagtattgctgctatggcactggaagccaatgttagcgaaccgacggtgaatcgtttctgtcgcagcatggacacgcgcggttttcctgattttaaacttcatctggcacagagtctggcgaatggcactccctatgttaatcgcaatgtcaatgaagatgacagcgttgaaagttacacagggaaaatatttgagtccgcaatggcaacgcttgatcatgtccgtcatagtctggataaatctgccatcaaccgcgccgtcgacttgctcactcaggcaaaaaaaatcgcctttttcggattaggctctagtgccgccgttgcccacgatgcgatgaataagttctttcgttttaatgttccggtggtgtactccgatgatatcgtgctgcaacgcatgagttgtatgaattgtagcgacggagacgtggtggtgctgatttctcacactggaagaacaaaaaatctggtcgagctggcgcagctggcacgcgaaaacgacgccatggtgattgccctcacctctgcgggtaccccgctcgcccgggaagcaacgctggcaattaccctcgacgtaccggaagatactgacatttatatgcccatggtttctcgacttgcacagctgaccgtgatagatgtgctggcgacaggatttactttgcgacgcggtgcaaaattcagagataacttgaagcgggtcaaagaagcgctgaaggaaagccgttttgataagcagttacttaatttaagtgacgatcgctaaaaacgactgtcactgtcctaatcttatacgacatccgaatgagattaatttatcgccatcgcggcgttatttcattcggatttcatgttcaagcaacacctggttgtttcagtcaacggagtattacatgtccagaaggcttcgcagaacaaaaatcgttaccacgttaggcccagcaacagatcgcgataataatcttgaaaaagttatcgcggcgggtgccaacgttgtacgtatgaacttttctcacggcagccctgaagatcacaaaatgcgcgcggataaagttcgtgagattgccgcaaaactggggcgtcatgtggctattctgggtgacctccaggggcccaaaatccgtgtatccacctttaaagaaggcaaagttttcctcaatattggggataaattcctgctcgacgccaacctgggtaaaggtgaaggcgacaaagaaaaagtcggtatcgactacaaaggcctgcctgctgacgtcgtgcctggtgacatcctgctgctggacgatggtcgcgtccagttaaaagtactggaagttcagggcatgaaagtgttcaccgaagtcaccgtcggtggtcccctctccaacaataaaggtatcaacaaacttggcggcggtttgagcgctgaagcgctgaccgaaaaagacaaagcagacattaagactgcggcgttgattggcgtagattacctggctgtctccttcccacgctgtggcgaagatctgaactatgcccgtcgcctggcacgcgatgcaggatgtgatgcgaaaattgttgccaaggttgaacgtgcggaagccgtttgcagccaggatgcaatggatgacatcatcctcgcctctgacgtggtaatggttgcacgtggcgacctcggtgtggaaattggcgacccggaactggtcggcattcagaaagcgttgatccgtcgtgcgcgtcagctaaaccgagcggtaatcacggcgacccagatgatggagagtatgattactaacccgatgccgacgcgtgcagaagtcatggacgtagcaaacgccgttctggatggtactgacgctgtgatgctgtctgcagaaactgccgctgggcagtatccgagtgaaaccgttgcagccatggcgcgcgtttgcctgggtgcggaaaaaatcccgagcatcaacgtttctaaacaccgtctggacgttcagttcgacaatgtggaagaagctattgccatgagtgcaatgtacgcagctaaccacctgaaaggcgttacggcgatcatcaccatgaccgaaagcggtcgtaccgcgctgatgacctcccgtatcagctctggtctgccaattttcgccatgagccgccatgaacgtacgctgaacctgactgctctctatcgtggcgttacgccggtgcactttgatagcgctaatgacggcgtagcagctgccagcgaagcggttaatctgctgcgcgataaaggttacttgatgtctggtgacctggtgattgtcacccagggcgacgtgatgagtaccgtgggttctactaataccacgcgtattttaacggtagagtaagtacgttgccggatgcggcgaaaacgccacatccggcctacagttcaatgatagttcaacagatttcgaatattctgaagcaaacttgaacttatcatcaggcgaaggcctctcctcgcgagaggcttttttatttgatgggataaagatctttgcgcttatacggctggatttcgcccggtttgcgagttttcagcaattttagtatccaggtgtattgttctggtcgcggaccaacaaaaatctcgacttcttcattcatccgccgcgcaatcgtatgatcatccgcctctaacagatcatccatcggtgggcgcacctgaatcgtcagacgatgcgtcttgccatcataaatcggaaacagcggtacaacgcgcgcacggcacactttcatcaaacgaccaatcgcgggcaacgtcgctttataggtggcaaagaaatccacaaattcgctgtgctctgggccatgatcctgatcgggtaaataatatccccagtacccctgacgtacgctctggatgaatggtttaataccgtcatttctcgcatgcagacgaccgccaaagcgacgacgcaccgtgttccagacataatcaaaaaccgggttgccctgattatggaacatcgctgccattttctgcccttggctggccatcagcatggcaggaatatcgacggcccaaccgtgcggcaccagaaagataactttctcgttattacgccgcatctcttcgatgatctccagcccttgccagtcaacgcgcggctgaattttctccggcccgcgtattgccaactcagccatcattgccatcgcttgcggcgcggtggcaaacatctcatcaacaatcgcttcgcgttcagcttcactacgttctggaaagcagaggctcagattgattaacgcacgacggcgactgctttttcccagtcgtccggcaaaacgtcccagccgtgccagaatgggatcacggaactttggcggcgttaaagcgatacccgccatcgctgctacgcccagccatgctccccagtagcgcgggtggcgaaaggatttatcaaactcaggaatgtattcgctattattttttttcgtttccatgcttttccagtttcggataaggcaaaaatcaatctggtgatagtgtagcggcgcaacttgccccgcaccaaataaaaaaagccggtactgactgcgtaccggctgcgaatggatgttaattaatcaaaccgtagctgcggcacaatctctttggcctgcgccaggaattcgcgacgatcggagccggtcagcccttcggtacgcggcagttttgccgtcagcgggtttacggcctgctggtttatccatacttcatagtgcagatgcggcccggtactacgtccggtattaccggaaagcgcgatacggtcgccacgtttcaccttctgtcccggtttcaccagaatcttgcgcaagtgcatataacgcgtggtgtagctgcgaccatgacgaatagccacataataacctgctgcgccactgcgtttggcaaccaccacttcaccgtcacccacactaagcactggcgtaccctgcggcatggcgaaatcaacacctctgtgtggtgcaacgcgaccggtcaccggattagtacgacgcgggttaaaattagagctgatacggaactgtttcgccgtcgggaatcgcaagaatcctttcgccagaccagtaccgttacgatcgtagaatttgccatcttcagcgcggatagcgtaataatctttaccttcactacgcaaacgtacgcccagcagctggctttgctcacgtttaccatcaagcatttctcgagacattaacaccgcaaattcatcgccttttttcagtttgcggaaatccatttgccactgcatggctttaatcactgcgctcacttcggcgctggttaaaccggcgtttctggcgctggcaacaaagcttcccccgacggtacctttcagcagattgttaacccactctccttgctgcatttcgctggtcattttaaaaccgttagcggcagtacggtcataggttcgggtttcacgacgagacacttcccaggtgaggcgctgcagttcgccgtccgcggttaatgtccaggagagttgttgaccgattttcaggttacgcaattctttgtcggccgcagccagttgggtgatatcacccatatcaataccatactgattgagaatgctgcttagcgtatcgccagtggaaacaacatattcatgcacgcccgcttcaccggcgattttgtcatccagttcgtcctggggaatggcttcatcttcttgtgcagcttgatcaatcggctcactggcttcaggtaagaggctacgaatttcgttctgttccagctcaatggttttgacaattggcgtggcatcacggtgataaacataaggccgccagacagcgacggccagagtaagaacggtgaggctccccaacataacgcggtgtggtcgcggtaaattattaaacgccagggcgacagagcgggctatctgttgcacgtaatcacttcctcattaatctcctttcaggcagctcgcatactggttggctaattgactcaggaattcactatagcttgttttacccagtttgatattcgtccccaggggatccaacgttcccatacgaacggatgtccctcgtgcgacgctctcaacgaccgctggcctgaactgtggctcagcaaaaacgcaggttgctttttgctcaaccaactgtgttcttatttcatgtaaacgctgcgcgccaggttgaatctcagggttaacggtaaaatgaccaagcggtgtcagtccaaactgtttttcgaaatagccgtaagcatcgtgaaaaacgaaataacctttccccttgagcggcgcgagctcgttaccaacctgcgtttcggtactggctaattgtgcctcaaaatccttcaggttggcgtcaagtttggctcgactttgcggcataagttccactaattttccatggattgcaaccgctgtagcccgcgctatctctggggaaagccaaagatgcatgttgaaatcgccgtgatggtgatcttcgtcacttttttccgcgtggtcgtgatcatcatcatcgccgtgaatacttttcatcagtagcggtttcacatcttcaagctgcgcaatcgttacctgcttcgctcctggtaatttgcttaccggtttttgcataaacgcttccatctccgggccaacccaaacgactaagtccgcgttctgtaagcgttttacatcgcttgggcgcagactataatcatgttcactagcgccgtcaggaagtaaaacctctgtttctgttaccccatcagcaatggcagaagcgatgaacccaacgggtttaaggctagcgacaacggcggcatctgcggcctgtgttgcacctccccagagagcggcggataatgctgcgaaaagaagcgtttttttatgtaacataatgcgaccaataatcgtaatgaatatgagaagtgtgatattataacatttcatgactactgcaagactaaaattaacatgacaagtctggtttccctggaaaatgtcagcgtttcttttggccaacgccgcgtcctctctgatgtgagcctggaacttaaacctggaaaaattttgactttacttgggccaaatggcgcaggtaagagcacactggtacgggtagtgctcgggctggtaacacccgatgaaggggttatcaagcgcaacggaaaactgcgcatcggctatgtaccgcagaagctgtatctcgacaccacgttgccactgaccgtaaaccgttttttacgcttacgccctggtacacataaagaagatattttgcctgcactgaaacgtgtccaggccgggcacctgattaacgcaccgatgcaaaagctctctggtggcgaaacgcagcgtgtactattagcgcgagcattgttaaatcgcccgcaattattagtgctggatgaacccactcaaggcgtggatgtaaatggccaggtggcgttatatgaccttattgaccaactgcgtcgtgaactggattgtggcgttttaatggtttctcacgatctgcatctggtgatggcaaaaaccgatgaagtgctgtgcctgaatcaccacatttgttgttccggcacaccggaagttgtttccctgcatccggagtttattagtatgtttggtcctcgtggtgctgaacaactgggtatctatcgccatcatcataaccatcgtcacgatttacagggacgaattgttttgcgtcggggaaatgatcgcagttgatttaacgtcggggaaatgatcgctcatgattgaattattatttcccggttggttagccgggatcatgctcgcctgtgccgcgggtccgctgggtagctttgtagtctggcgtcgtatgtcttatttcggtgatacgctggctcatgccagtttacttggcgtcgcgtttggtttgttgctggacgtgaatccattctatgcggtgattgccgttacgctgctgctggcgggcggtctggtatggctggagaagcgtccacagctggcgatcgacacgttattagggattatggcgcacagtgccctgagcctgggcctggtggtcgtgagtctgatgtctaatattcgtgttgatttgatggcttacctgttcggtgatttgctggcagtgacgccagaagatctcatctctattgcgattggcgtggtcatcgtggtggctattttgttctggcaatggcgcaatttgctgagtatgacgataagcccggatctggcgtttgttgatggtgtgaaattacagcgagtgaaattgttgttgatgctggtgacggcattgacgattggtgtagcgatgaaatttgtcggtgcgttgattattactagcttgctgattattcctgctactactgcgcgtcgctttgcccgcacgccggaacagatggctggtgtcgctgttttggtggggatggtggcagtgactggcggtttaaccttttccgcggtttacgatacgccggcgggtccgagcgtggtgctatgtgcggcactgttatttattctcagtatgatgaaaaagcaggccagctaatctatcgctgaacacatttgtcggatgcggcgcgagcgccttatccgacctacggttcggtatctctggtagtcctggtaagacgcgaacagcgtcgcatcaggcatattgccagtgccggatgcggcgcgagcgaccaatccgacttacggcatttctggcggcgttatgccaaagtgattccacgcccgcgtcgtcgccatacgcccacgcggtgtacgctgcaaaaagccttgctgaatcaaataaggttccagcacatcctcaatggtttcacgttcttcgccaatggctgccgccaggttatccagacctacaggtccaccaaagaacttatcgattaccgccagcaacaatttgcggtccatataatcgaaaccttcagcatcgacattcaacatatccagcgcctgagcagcgatatctgcgctgatggtgccatcgtgcttcacttcggcgaaatcacgcactcgacgcagcagacggttggcaatgcgcggcgtaccgcgagcgcgacgagcaacttccagcgcgccgtcatcactcatctcaagccccataaagcgtgcgctgcgactgacgatatattgcagatccggcacctgataaaactccagacgttgcacaataccaaaacggtcgcgcaacggacttgtcaggctacctgcgcgcgtggttgcaccaatcagggtaaacggcggcaaatcaattttaatggagcgtgccgccggaccttcaccaatcatgatatccagttggtagtcttccattgccgggtacagcacttcttcaacaactgggcttagacggtggatctcatcaataaacagcacgtcatgcggttcaaggttagtgagcatcgcagccaaatcgcccgccttttccagcaccggaccagaagtcgtgcgtaaattaacgcccatttcattggcgacaatgttggcaagcgtagttttacccaaccccggaggaccaaaaatcaacaaatgatcgagggcatcgccgcgcagtttcgctgctttgatgaaaatctccatctgactacgaacctgcggctgaccaacatactcttccagtaatttggggcgaatggcgcgatctgctacatcttccggcaaagtggtaccggcagaaatcagacggtctgcttcaatcatcctttacctcataacgcggcgcgtagggcttcgcgaattaaagtttcactgctggcgtcagggcgagcgattttgctcaccatgcggcttgcttcttgtggtttatagcccagcgccaccagcgcggcaaccgcttcttgttcagcatcgtcggtcgccgggctggcaggagacgtgagtaccaggtcggcggctggcgtaaagagatcgccatgcaaacctttaaatcggtctttcatttcaacaatcaagcgttcggcggtttttttgccaatacccggcagtttcaccagtgcccccacttcttcacgctcaacggcattaacgaactgctgcgcactcattccggagaggatcgccagcgccaacttcgggccgacgccgttggttttgatcaactctttgaacaatgtgcgctcttgtttattgttaaaaccgtacagcagttgcgcgtcttcacgcaccacaaagtgggtgaaaacgatcgcttcctgacccgcttcagggagttcataaaaacaggtcatcggcatatgcacttcatagcctacgccgcccacttcaattaacaccagcgggggttgtttttcaatgatgatgcctctgagtctgcctatcacatgacgctcctgcgtaatgaatcaaagataatgctgtatgataaaaaaatgctggatagatatccagcgaaggatgaagaaaacttgcgaggtgtctcgatgaactgaaaaatggcacagtataatttattctacaggttatattggaagcaaatattttaatattacatattcagtgaagaaatgcgtaataaaaatatacattgcgcctcctgaaaaaataaattttttatgctattacgtatatttgtatctatttcaatggaatgacaacgtgaatattaattaccctgctgaatatgaaattggagatatcgtctttacatgtataggtgctgccttatttggtcaaataagtgctgcaagtaattgctggagtaatcacgtcgggatcattatcggtcataacggtgaagacttcctggttgcagaaagccgggttccccttagtaccatcaccacgctatctcgttttattaaacgtagctctaatcaacgctatgctataaagcgattagacgctgggctgacagaacgacaaaaacaacgaattgttgaacaggttccctcccggctacgcaaactttaccacaccggttttaaatacgaatctagccgccagttctgtagtaaatttgtttttgatatttataaagaagcgctatgtattccggtgggtgaaatagagacgtttggagaattgttaaatagcaatccgaatgcaaaactcactttctggaaattctggttcctgggttctattccgtgggagcgtaaaaccgtcacgccagccagtttgtggcatcatccgggtttggtgttgattcatgcggagggagtggaaacgcctcagccggaactgaccgaggcggtataacttaacgcagtcgccctctcgccaggttcagccggctttcgctcatctgcatcgcattctgactaacgtggcagtgggtgatagcaatcgccagcgcatcggcggcatccgcctgtggattagcgggcagtttcagcaaggtgcggaccatatgctgcacctggcttttttcggcactgccaatacctaccaccgtttgctttacctgacgtgccgcgtattcaaatactggcaactcctgattcaccgccgccacaatcgccacgccgcgcgcctggcccagtttcagggcactgtcagcgttctttgccataaagacttgttcaatggcgaaataatcaggctggaactgggtgatgatttccgtcacgcccgcatagatgagtttcagacgagacggtaaatcatccactttggtgtggatgcatccgctacccaggtaggacagttgcctacctacctggcggatgacgccgtagccggtcacgcggctacccggatcaatgccgagaataatagccatcacgcgtctccgttttgctgtttagcaggcctcatcagagagtcgctgcgacctcatcagagatttcaccgttatggtaaacttcctgcacgtcgtcgcaatcttccagcatatcgatcagacgcatcagtttcggtgcggtttctgcatccatatcagctttggtagacgggatcatggaaacttccgcgctgtctgctttcagacctgccgcttccagagcgtcgcgcactttacccatttcttcccatgcagtgtagacatcaatcgcgccgtcatcataggtcacaacgtcttcagcacctgcttccagtgctgcttccatgatggtgtcttcatcgcctttctcgaaggagatcacgccttttttgctgaacagataggcaacggaaccatcagtaccgaggttaccgccacatttgctaaatgcatgacgcacttcagcaacggtacggttgcggttgtcagacagacattcaatcatgattgccgtgccgccaggaccgtaaccttcgtagatgatggtttccatgtttgcatcatcatcaccgcccacaccacgtgcaattgcgcggttcagtgtgtcacgggtcatgttgttagacagtgctttatccaccgccgcacgcagacgcgggttagcgtccggatcgccaccgcccagcttagccgcggttaccagctcacgaatgattttagtgaagattttaccgcgcttagcatcctgcgcagctttacgatgtctggtgttggcccatttactatgacctgccataaaaatatctccagatagccctgcctgttcaggcagcgttaattacaaactgttcaatcgcctgccggttgctccaggacttagtgagcgccgccgcagcaggcgcatcaagccacttgtaagccagatgttcagtgaaaacgatctgccgctcgtgcggaagcgcaagacagaaccaactttccgtattacgcgtcacgcccggcgcatagcgatgacgtaaatgactaaaaatttcaaactctaccgtgcgctgacagtcaattaaggtcagttgttcagcgacaacatcaatggtgacctcttcctttacttcgcgcatggcagcttgcggcgcggtttcaccctcttccacgctgccggttacgctctgccagaaatcgggatcgtcacgccgctgcaacatcagcacccgtttcgtatcttgtgcgtagatgaccactaagatgctaacgggacgcttatacactttatccttcacgctgcctcttcgttgactgccttcgctcatcccattcacatagttatctatgctcatgggagttcactcagttgccgcctcgatgcaacgcgaatgatttcgtgtatttgagtcatatcagttattctcagccttcttcacaacctgaatgctcagctcagccagtgcagtcgggttagcaaagctcggtgcttcagtcatcagacacgctgccgccgtggttttcgggaaggcgataacgtcacggatattgtcggtgccggtcagcagcatggtcagacggtcaagaccgaatgccagacctgcgtgcggcggagtaccgtatttcagagcgtcgagcaggaagccgaatttctcgcgctgttcctcttcgttgatacccagaataccaaacaccgtctgctgcatatcaccattatggatacgtacactaccaccgcccacttcgtaaccattgatgaccatatcgtaagcgttcgccaccgcattttccggtgcagctttcagttctgcagccgtcatatctttcggactggtgaacggatggtgcattgccgtcaggccgccttcaccgtcgtcttcaaacatcgggaagtcgataacccacagcggtgcccatttgctttcgtcggtcagaccaaggtctttacccactttcaggcgcagtgcacccatcgcgtcggcaacaattttcttgttgtcggcaccgaagaaaatcatatcgccatcttgcgcggcagtacgatccaggatgtcttcgatgatttctgcattaaggaacttcgctaccgggctgttgataccttccagacctttcgcgcgttcgttaactttgatgtaagccagacctttcgcgccgtagattttaacgaagttaccgtattcgtcgatctgcttacgggtcaggcttgcgccgcccggaacgcgcagagccgctacgcgacctttcggatcgttcgccggacctgcaaatacagcaaactcaacagatttcagcagatcagcaacgtcagtcagttccatcgggttacgcagatccggtttatcagaaccataacggcgttctgcttccgcaaaggtcattaccgggaaatcgcccagatccacacccttcacttccagccacagatgacgcaccagcgcttccatcacttcacgcacttgcggcgcggtcatgaaagaagtttccacatcgatctgagtaaattcaggctgacggtcagcacgcaggtcttcgtcacggaagcatttaacgatctgatagtaacggtcaaaaccggacatcatcagcagctgtttgaacaactgcggggattgcggcagtgcgtagaatttacctttgtgcacacgagaaggcaccaggtagtcacgcgcgccttccggcgtggctttggtcagcatcggagtttcgatgtcgaggaagccgtggtcatccataaaacggcgcaccaggctggtgattttagcgcgggttttcaggcgctgagccatttccggacgacgcaggtcgaggtagcggtatttcagacgcgcttcttcggtgttgacgtggttagagtcaagcggcagaacatctgcgcggttgatgatagtcaggctggacgccagcacttcgatttcgccggtcgccatatcgcggttaatatttttttcgtcacgcgcacgtacggtgcccgtgacctgaatgcagaactcattacgcagttcagaggccagctttaacgcgtccgcacgatccggatcgaaaaatacctgcacgataccttcgcggtcgcgcatatcgatgaagatcaggctaccaagatcacgacgacggttgacccaaccacacagagtcacctgctgccccacgtgggacaaacggagctgtccacaatattctgtacgcatgagatatcccttaacttagctgccggcggatgccccctgctgcgcaggtgaccaagtcgcagcgttagctgtatgtcacaactgaatgaaaaaaggcggctattatactggaaattctgccgcaccgtaagagcctggcccgcgctggaacgcctcgttaccactttatatcgggcctgaaatcagactctacgccagtttgctataaaggtgttgcccgaactcataaaaattaacaaaatttgtcgttccgccatcggctaatcgcattaaggtgtgaggcacgattttgttttttcaggagtcattatgcttgaacttaatgctaaaaccactgcgctggtggtgatcgatttacaagaaggcatcttaccttttgccggtggtccacatactgccgatgaggtagttaatcgcgccgggaagctggcggcgaaatttcgcgccagcggtcagcccgtgtttctggtgcgcgttggctggtctgccgattacgctgaagcattaaaacagccggtcgatgcgcccagtccggctaaagtgttgcccgaaaattggtggcaacatcctgctgcattaggtgcaaccgacagcgatatcgaaatcatcaaacgtcaatggggtgcgttttacggtacggatctggagttgcaattacgccgccgaggtatcgatacaatagtgttatgtgggatcagcaccaatatcggtgttgaatccaccgcccgcaatgcctgggaacttggctttaatctggtgattgccgaagacgcctgtagtgccgccagcgccgagcagcacaataacagtatcaaccatatctacccgcgcatcgcccgtgtgcgtagcgtggaagagatcctcaacgcgttatgatttacatcggtctaccgcaatggagccatcctaaatgggtgcggttggggatcaccagccttgaagagtatgcccgccactttaactgcgtggagggcaacaccacgctttacgccctgccgaaacccgaggttgtcctgcgctggcgtgagcagaccacagatgacttccgcttctgttttaagtttccggcgaccattagccatcaggcagcattacggcattgcgatgatttagtgactgaatttttgacccgcatgagtccgttggctccgcgcattgggcaatactggctgcaactgcctgccacattcggcccacgggagctgcctgcgctttggcattttctcgattctcttcctggcgaatttaattatggcgtggaagtccgccatccacagtttttcgccaaaggagaagaggaacaaacgcttaatcgcggtttacatcagcgcggcgttaatcgggtgattttagacagccgcccggttcatgcagcacgtccacacagtgaagctattcgcgacgctcaacgaaaaaaacctaaagttccggtacatgctgtactgacggcgacaaatccgctgatccgttttatcggtagtgatgatatgacgcaaaaccgggaattatttcaggtctggttacaaaaattagcgcagtggcatcagaccactacgccttatctttttttacatacgccagacattgcccaggcaccggaactggtacataccctgtgggaagacttacgtaaaacgcttccagagatcggagcagttccggctattccacagcaatcttctcttttctgaatttgccacctatcatagacaggtgccatcggccattttaaagggagtttgtatggtaagcgcgctgtacgccgttttaagtgcgttgttattaatgaagttctcttttgatgtcgttcgcctgcgaatgcagtaccgcgttgcctatggcgacggcggttttagcgaactgcaaagcgctattcgcattcatggtaacgcggtggaatatattcccatcgcgattgtgctgatgctgtttatggaaatgaatggcgcagaaacctggatggtgcatatttgcggcatcgttttgcttgctggtcgtctgatgcattattacggttttcatcaccgtctgttccgctggcgacgttccggcatgagcgccacctggtgtgcgctgttgctgatggtgctggcgaatctttggtatatgccctgggagttggttttctccctgcgttaacgcacaatacgccactttctttttcccggatttttacgttatgtctcaccgcgacacgctattttctgcccctatcgccagactgggcgactggacctttgatgaacgggtagctgaagtcttcccggatatgatccagcgttccgtacccggctattccaatattatttccatgattggtatgttagccgagcgcttcgttcaacctggtacgcaggtttacgatctgggttgtcctctgggcgcggcgacgctcagcgtgcgtcgcaacattcatcatgataattgcaaaattattgccatcgacaactccccggcgatgattgaacgctgccgtcgtcatattgacgcctataaagcccctacgccagtagacgtcattgaaggtgatattcgcgatatcgccattgaaaacgcaagcatggtggtgctgaattttaccctgcaattcctggaaccttccgagcgccaggcgttactggataaaatttatcaagggctgaaccccggcggcgcgctggtgcttagcgaaaaattcagtttcgaagatgccaaagttggtgaactgttgttcaacatgcaccacgactttaaacgtgccaacggttacagcgaactggagatcagccagaagcgcagcatgctggaaaacgtgatgctgaccgattccgtggaaacccataaagcacgcctgcataacgccggttttgagcatagtgagctgtggttccagtgctttaactttggtagtctggtggcattaaaagcagaggacgctgcatgatcgactttggtaacttttattctctgattgccaaaaatcatcttagtcactggctcgaaacgctgcccgcgcagattgctaactggcagcgcgagcagcagcacgggttgtttaagcagtggagtaatgcggtggagtttctacctgaaattaaaccgtatcgtcttgatttattgcatagcgttacggcagaaagcgaagagccactgagcgcagggcaaattaaacgcattgaaacgctgatgcgcaacctgatgccgtggcgcaaagggccgttcagtctgtatggcgtcaacatcgataccgaatggcgttccgactggaaatgggatcgtgttctgccccatctttctgatttaaccggacgcaccattctggatgtcggctgcggcagcggttatcacatgtggcgcatgattggcgcaggcgcgcacctcgcggtggggatcgaccctacgcaactgtttctgtgccagtttgaagcggtgcgtaaactactgggtaatgatcagcgcgcgcatttgttaccgttaggtattgaacaacttccggcactgaaagcctttgataccgtctttagcatgggcgtgctttaccatcgccgtagtccgctggagcatctatggcagttgaaagatcaactggtcaatgaaggtgaactggtgctggaaacgctggttattgatggtgatgagaacacggtgctggtaccaggcgatcgttacgcgcaaatgcgtaatgtctatttcatcccttccgcgctggcgctgaaaaactggctgaagaagtgtggttttgtagatatccgcattgcggatgtgagcgttaccaccacagaagagcagcgacgcaccgaatggatggttaccgaaagcctggccgatttcctcgacccacatgatccgggtaaaacggtggaaggttatccggcacctaaacgcgcggtgctgattgcgcgcaagccgtaaaggtctggtattactgccggatgcggcgtgaacgccttatccggcctacaaaaccttgctaattcaatatattgcagggactatgtaggcctgataagcatagcgcatcaggcagctttacgtttgcataacctcagcgcccgtttccgggcgctattcacgtcttacgcctgaacagctggctgatcaaacgccgttaacttcggtgcattgcccgtatatttttcgatatacaccaacgcactgttaccggcacaggcatttgccagctggctgctggggatatccgccgttaacacgttcgcactgccgtttttacacaagccattttccagatctggccatgcaccttcatgcacgcataccacgccttttttgatcccgtcagtcaccaccgcgcctgtcaaaatctgaccacgtttgttccagacacgcaccagatcgccattcgcaataccaaagcgtgcagcatcttcggtgtgaatagtgattggttcacgatcggcgatcgcatattttttacgcagttccgcatagttaagctgactgtgtaaacggtgtgccggatgtgcggtcagaagctgtaactgcttctcgtcggcggtacctttccattcatcaggagccagccaggttgggtgtgccgggcaatccttatagccaaatttttccaacgttttactatagatttcaattttgccgcttggcgtacccagcgcatttttcaccggatcggcgcggaaatcaccataacgaacgtactgttcgttcttctcgctgtggcgcatttcgatcagtttattttgctgccagaaggcattaaacattggcatagtgacgcgttgcgcacgggcacctttctgagcggcatcatagaaaaatttcagccacgccatttcatctttaccttcggtatagatctcttttccgccaggtttgagtaattccgcaagatcggcaaacacgtcaaaatcgttacgcgcttcaaattgcggagcaacagcctgcttcatcggcacaatatgctggttgctgtaatcaccggtcatcgtcaagtcattgcgctcaaagcttgtggtgatcggtaatacgatatctgcgtgtttggctgctgcggtccagtagcattcagaaacgacgatcatctccggtttctgccatgctttaatcagacgattagtatcctggtgatgggtaaagttaccgccacccgcccaccagatcattttgatattcggatacgtttgttctttaccgttatgctgatatttgccgccaggattttccagcgcatcgacgatacgggcaacaggaatcgccgtcattccgccatcatcagcggcctcgctggcatgtccggcaatcgccgcagacatttccggcagcacgccgccaacacgcgtcgggttgccaccgttggagtaatgataagagaaaccaaaaccgccgcccggtgtaccaatctgccctaacatcgccgccagcgtcaccagcatccagtgtttctgttcaccatattgctggcgctgaattccccagcctgccatcagcattgtgcgattcgccgccatcagttcagcgagtttgactatctgcgcttccggtacgccagtaatttccgccgcccagaccgcgctcttcggcgtattatcgctcttacctgtcagatactcttcaaactgcggatacccggtagtgtatttttcaaggaacactttatcgtgtttgccttgtgtcatcagggtatgcgcaatccctaacatcagtgccacgtcggtgcccatattcggcgcgatccaggtggcattatcgtcaaagaattcgatggtttcggagcggataggatcaatggcaatcactggtttgccagattttttcagctgatggaagtattccagcccttgctcatcggtactgctccaggcaatttttaaggtattcagcgggttcattccccacagcaccacaacctggctgttttccagaatcagcggccaggaggtctgctgttcatacacctctacagaaccgaccacatgcggcatgatcacctgtgctgccccggtactataatcgccgctatgcccggaataaccgcccgccaggttcatataacgttgcagtaaggtttgcgctttatgcaacacgccagaagagcgccagccgtaagatccggcaaaaatggcgcttggtccgttagctttacgaatacgatcatgttgctcatgaatcagttttaatgcctgttcccagctcacctgtacataggtatcttcgccacgacctttcgccggttgcagtggattatcgagatagctttttctcaccatcggatgctgaatacgcgccgtggtgtgtacctgatccgccgccgtagactgtaaggaattcggtatggttttcgccagcgcgcctgtactagaaacaatcttgccgtccttcacttctacgttcatcgctccccaacgtcccgcggtgaggattttaccgcccttctcttctgcccatgcggggagcggtgctgcgcttgtcaccaccagcgctccagcggcaataccgctgtgtttaataaattcacgtcttgttaatgtcataacttcctccctgatcaacgaggatcactgtttctcggtaatatctttggcgttgtactggaaataccgcgttaaaatgtccagttcgttttcgctcatgctggttcgtgcccccattcctttggcaatggacggccacgcattgacggtgtaatggtcggcggcaataggggcatgacaaccagcgcaataggtatcgtcaagtttttcagcgtattgccatagcggtttacggtccgctaatgcgggatcggtaagcgcaccctgtaaagacgcctgacgccattgattgccgtattcgtcagcctgccattccccgtttacagtgagcgccttgataccttcttcacttaatgtggctagcgccagccgttgacctgccgccaggtagagcgtgttttcactgccctgcatttgataaccctgcaacagaacgatcggctgtttgccactggcatcaacgacggtgagatcggttccaggattcacggtagccagctcgcctatgtgagaagttttgaaaggataaatatgtgcgccattagtaacactagtagcggcctgactttccagctcatgcgccgcgttgtcatccatttttatttctggcggaaaatgggcaatgcctttatgacaatcgatacaggtttcgctgtccttttgtgctttgttatgcattttctgcgcagattcactttggctggcaatatccatggcatcaaaagaatggcaactacggcacgttgcagagtcagtggcttttaattctttccatactgtttcggccatttcctggcgatgagcttcgaacttatcgtcactgtctattttgccgctaacaaattcatgataaatatctttagatgcctttaatttagcaaataaataatccatcccactctttggaatatggcaatcggcacattccgcacgtatccctttctggttgctaaagtggacagttccctgatattcctcaaaaggtttactcatgctgtggcaggaaaggcaaaatgctgtatcgctcgttttatgtaagactttttgcgccagcaataacccgccgccaccaaccacaaccgctatcagcaaaaacaataacccaatgcgttttttccctcgcatagattcctctaattaaattactggacaccgaaatcattgtataattaaatatacaacgaattaaccgcttgcataattaggcacaacactgcctgaaacaatcgataaagaatatgatttattacaatgtaatcattaattgctaaggaataacccagttgctatttagaatatatatttatcagttttagtaatttaaatcccataattaatgtgaatatatacaatatttttagcacaacgctatgcgcactgtcacccgctcaacagatcacggttatcgttcgttttttatactgttcagggataaaaaaaggcccctgttgaaattgcaggggcctggtacgagcaagcatcatattgggcgacatgatgcaacggtaaaaatcatttggcctgatggcgttcaatgattcctttcatttcagcaaccgccgccccgtctacgatataacggctatactcgtccgcgtgttcatcactactcatggacaatccttgattacgataacgcatcggactggcttgccacgctcccgcggagctatggacttccagcactccggcatcgaggaagtggtgcaggttttctgcacggactcctgctccggccataatgattggagcatcacgatgggcaataagttccataattttacttaaaccttgcagtgcgtcacttttttgcccacttgtcagtacccgggcaatgcccaattccgcaagattattgagtgtatataaagggttagcgcacatatcgaaggcgcgatgaaaagtcactgccagcggaccggcagcagccattattttttccattcgtggcatatcgacattcccgtcaacatcgagaacgcccgtcaccagtccaggaaaacctaattcgcggaccgtgcgcacatcctcaagaatggcggcaaactcaccgtcgctgtagcaaaaatcaccaccgcgtgggcgaattatcggatgcacagggatcgtcacccgctggcgcacggatttcagtacacccaagctcggcgttaagcccccctcttttggggctgcgcataattcaactctgtctgcgccgttttgctgcgccgttagtgcacattccatgctgtaacagcaaatttccagtaatgccatttttactccttaattacgcgctctgctcgctggcaacgatctcttcaatggaccacggatgaaacttaatagttgttttgccatcggtgaccgccagcgtcggattcggtaatcgctcatgctcaccttttgggctactggttttcacactgatccccggtaggctgagtccttcatcagaaagcaatgccagcgcacgggcattcagcgtttctggatcacccggcagaacgatttcaatatgttcccaaccttcgtgtgggtaacgtttttccccgggccacggtagctccacaatagaaaactgccagtgcgcaacctgtaccggttcatgcaatttaaacagacaaatcggtctgccattgatcatattttcactcaaaagctcgccacactgttcaaacccgcgacgccagcgttcagcagtggcgttttgatggcaacgcaaagaaatgtgatcggcagtcagcggagtgatattcaaccccagacggcgggaaagttcatctaatgcgtggataaatcgcggtaaatcgcttgcaatatcctgcagctcgtcgatagattgccagttcgccataatcactcttcgtctttcagtaaaagcgttaatttaccctgttgccctgtgccaaccaaccgctgatttcacgccgcttctgatgcaatagtgaaaacggcaatacgccacgcgcacgttgctgacgaaaacagccatttgcagtatactcccgccctaatttctttaactggtgcgggcaatttttgctcgcttcatcaatgtaaggtattccggtgaatattcaggctcttctcagtgaaaaagtccgtcaggccatgattgcggcaggcgcgcctgcggattgcgaaccgcaggttcgtcagagtgcaaaagttcagttcggcgactatcaggctaacggcatgatggcagttgctaaaaaactgggtatggcaccgcgacaattagcagagcaggtgctgactcatctggatcttaacggtatcgccagcaaagttgagatcgccggtccaggctttatcaacattttccttgatccggcattcctggctgaacatgttcagcaggcgctggcgtccgatcgtctcggtgttgctacgccagaaaaacagaccattgtggttgactactctgcgccaaacgtggcgaaagagatgcatgtcggtcacctgcgctctaccattattggtgacgcagcagtgcgtactctggagttcctcggtcacaaagtgattcgcgcaaaccacgtcggcgactggggcactcagttcggtatgctgattgcatggctggaaaagcagcagcaggaaaacgccggtgaaatggagctggctgaccttgaaggtttctaccgcgatgcgaaaaagcattacgatgaagatgaagagttcgccgagcgcgcacgtaactacgtggtaaaactgcaaagcggtgacgaatatttccgcgagatgtggcgcaaactggtcgacatcaccatgacgcagaaccagatcacctacgatcgtctcaacgtgacgctgacccgtgatgacgtgatgggcgaaagcctctacaacccgatgctgccaggaattgtggcggatctcaaagccaaaggtctggcagtagaaagcgaaggggcgaccgtcgtattccttgatgagtttaaaaacaaggaaggcgaaccgatgggcgtgatcattcagaagaaagatggcggctatctctacaccaccactgatatcgcctgtgcgaaatatcgttatgaaacactgcatgccgatcgcgtgctgtattacatcgactcccgtcagcatcaacacctgatgcaggcatgggcgatcgtccgtaaagcaggctatgtaccggaatccgtaccgctggaacaccacatgttcggcatgatgctgggtaaagacggcaaaccgttcaaaacccgcgcgggtggtacagtgaaactggccgatctgctggatgaagccctggaacgtgcacgccgtctggtggcagaaaagaacccggatatgccagccgacgagctggaaaaactggctaacgcggttggtattggtgcggtgaaatatgcggatctctccaaaaaccgcaccacggactacatcttcgactgggacaacatgctggcgtttgagggtaataccgcgccatacatgcagtatgcatacacgcgtgtattgtccgtgttccgtaaagcagaaattgacgaagagcaactggctgcagctccggttatcatccgtgaagatcgtgaagcgcaactggcagctcgcctgctgcagtttgaagaaaccctcaccgtggttgcccgtgaaggcacgccgcatgtaatgtgtgcttacctgtacgatctggccggtctgttctctggcttctacgagcactgcccgatcctcagcgcagaaaacgaagaagtgcgtaacagccgtctaaaactggcacaactgacggcgaagacgctgaagctgggtctggatacgctgggtattgagactgtagagcgtatgtaatcgatttttcgtgagagtgaagcctgatcagggttagccgatcaggcttttttattgccatctaaatgtattctgaaaatggacatgccattgttttctcactgttggataagaggccagaagcgtaatatccggccccagggaaacgataacggttgaatttaaggaataccgcagtgtttaaatttcttgtattaacattaggcattatctcttgccaggcttacgcagaagatacggttatagtaaacgaccatgacattagtgccatcaaagattgttggcaaaaaaatagtgatgatgatactgacgttaacgtgatcaaaagttgcctgcgacaagaatacaatctcgtcgatgcgcaattaaataaagcctatggtgaagcttatcgttatatagaacaagtgccacgcacaggtgtaaaaaaacctgataccgaacaacttaacttgcttaaaaaaagtcagcgagcctggctggattttagggacaaagaatgtgaattaatccttagtaatgaggacgttcaggatttaagtgacccttattctgaaagtgaatggctcagttgtatgatcatacagaccaatacgcgaactcgccagttgcagctataccgtaactctgaagatttttatccaagccctttgacaagaggataattcacatctttttggcatgttttgttgcaagctattcctgataaataattgcaacaagacatcgagcctttttcactgagttattaaacatactcgcgagcgcgtcgctacgctagcaagcaaaaatgaaacaggaataatcgaaatgggatgttgcgcacagtcaaaataactcaccgtaaataatcatctgctataaataatcactttcatgcaataccagataagctatttttaaacagacacttaccgcacaacaaactaattaaatacaaagaaaggcaacaatcaacttaatgttaatgaaatgttttacatatattaaccacttgtttaatgcggagaatcagtacactattttcttataattacatttgaaattatatgatcaccgggagtgattgattaattatctttactaataatcagactaatatttacctgtttgaccgagttgggattgcgtcgtttctccattaggagtaaagctttaatgtcacctgaagttcacagaataaggaacaggttatgagctatagcaatattcttgtcgctgttgcggttacaccggaaagtcagcaactgctggcaaaagcggtatctatcgccaggccagtaaagggacacatcagtttaattactctcgcttccgacccggaaatgtacaatcaattagctgcgccgatgcttgaagatttacgcagcgtgatgcatgaagaaacgcaaagctttcttgataagttaattcaggatgcggggtatcccgttgacaagacgtttattgcctacggtgagttaagcgaacatattctggaagtatgtcacaagcatcatttcgatttggtgatttgcggtaatcacaatcacagtttctttagccgagcatcctgcagcgcgaaaagagttattgccagtagtgaggtcgatgtgctgttagttccacttacgggagattaaccgctcttacgcaagctttggaaaggtagcaactttatcgcgctgctggctttccgcgcttcgcggaactatctgctttaggtcgctaatgaagcactcctgccagtggttaatatcgtttttcacgataacgtccagcatttctgcatgacgggaaatacgttccgccaggctcatagtcaatgcacgatccagcgcagctgcaacttcgtcacgatcgtaggggttaacaattaacgcgctcgttaactcgtttgccgctcccgcaaattggctaagaacaagaacgcccggattggctgggtcctgagcagcaacatactcttttgctaccaggttcatcccgtcacgcagtggcgtcactaagcccacgtcagagtagcggaatattttcatcagtaatttacggtcaaaatgctgattcaaataataaagcggcgtccagcctaattgcccgtatttaccattaattcgtccagcttcattttcgagctgatgacgaatatcctgataggcttgcacatcaccacggctcgttggtgcaatctgggtataacgaattttaccatgatgctgcggatatttttccagcaacgcttcataggcgagaaaacgctctggcaaacctttggaataatccagccgttcgacagaaaagatattttgtacgtttttcagttccgctttaagttgcgccagttttggcggcagtggcccggcagcctgtttggctatttctttcggttcaatgccgatcgggtagacttctgttcgaaatgctttgccccaggctgtatggctttttgcgctacgtgtcgtgacgcgggtcaggttagaaagacaatccaggaacgccagacgatcgttttctgtctggaaacccagcaaatcataatcacaaagctgttcaagcaaggtgtcatatgtcggcagcgcgttgaagatttccggtgtcgggaaaggaatatgcagaaagaaaccaatgcgattattcactccccgtttgcgtaattcatgcgcaaatggcaacaggtgataatcgtggatccagataatgtcatcgtcttgcaacagcggcagtaatttatctgccagcaacgcatttacgcgtagatagccgtcccaggcaggacgctgaaattgcaccagatcgagccgataatgaaaagcgggccagagaacggcattggagaattggttgtagtattcgtcaaggtcctgttcgctgaggttaaaagaggcccacgtaatgttaccttttttcaccttttttagcggctgatcctcattccctgtttcaccactccagccaaaccacagtccgcctgcggctttcagtgcccccagtatgccaacggcaaggccaccggcactggcggcgtgctcgtctggtggtgcaatccggttagatactacgactaaacgactcatagtcatcactcctgttatttttacttagatactacgactaaagctctcatagtcatcactcctgttattttctcttttttgttgtaatgcggtggttatcatttcaagccagctccagacatccggcacacccgccagtcgccaacttgcctgagttgcacctgtgccaatttttacactcattccgcccagtcggttaacgactgcgaagccagattcatcggttaaatcatcgcccagaaatacgggcgttcgcccgataaagggagcttcctgcataaaagctgcaattgcctcacctttactggtacctctcggtttgatctcgacaacacactttccctgctgtaacgccatttgtggccagatctgagtaatacgttgcgctaatgtcattaatgcgtcttcatgctgcggagcctgacgataatgcagcgcaaaagccatccctttcgcctccagctccgcgccgggatactgagcgatgactgtatgcagttgcacgctaatatcacgcgcaatcgcatccggcagatgaacgatatgtgttttaccattgatgtcacggcgctccgccccatgcacgcccgctaacgggaagcgataaggttttgccagtgcgtcaagctccaccatactgcgcccacttatcaatgccaatgcaccatcacttgcggttgccagtagctgtagtccttgcagaatattgtcaggcacgacgacctgatcgggatgcggtttgatttccgccagcgttccatcaagatcaaaaaaccaggcatatttcgcggatagttcaggggtttcggttaacggttctgtcacccggttctcctccttctcttttcttattgtgttgcgcagaacgcgctttacagacatgtaagtatagacagtgtgacgggggtcgccatttgcaacgaagaacagccaaccgttatggcggttggctatggtgggaaaaaacgctaaattgttgcagaaaaaagcatcagacagtgcgtttcgctttttgcttgtaacggtcgaagatcaccgctgccagcaggattaagccgcgaaccacgtactgcgcgaaaggagaaatattaagcaggttcatggcgttttccacggtgcctaaaattaagatacccgccaccacataactgatttttccgatgccacctttcagagaaacgccacctaaaacgcaggcggagataacaatcagctcataaccaatgctcgtcattggctgcccactggtcatacgactagccagaataattccggctatcgcacttaccaggccactgagaacaaagataataattttggtgcgaacaaccggtacacccgccagacgcgcggcctcttcgttcccgccaatcgccagggtgttacgaccaaaggtggttttattcagcagcaaaccaaagataatcagacacgcgacggtgagccagattggcgcaggcagaccgaaccagttggcgtaaccaagggcaaagaagctttcatcttcgataccgaccgctttaccgtcactaatgatgtacgccagacctcgaacaatctgcatcgttgccaatgtcgtgatcagagcatttattttcagtttggcgataacaaagccattgaccaggccacagagaacgcccagcaacaaccccgctgccacgccaatccacaggctttcagtcaggttaataaccaccgccgtggtgacacccgcacaggcaattacggaggcgacagaaaggtcaaagtcaccggaagcgaggcagaacaacatgccacaagccaccatcccgctcatggaaattgccaggcccaaccctttcatattaatgaaggtggcaaaatttgggacaaaaatggcacaggcgataaagagcaccgcaaacaccaccagcatgccgtactgatcccagatacgcccgaagctgaaactgctcttaggtgcgccagacccgcttgtagaaacagaagacatcatactctccttactcaggcaacagcctggctgactttaggcatcgcaaggctcagtgcctgacgctcatctgcctgctcgtgtaacaattcaccggcgatttcaccttcccgcatcaccacaatccggtcggcaacgccgaggacttcaggtaagtcgctggaggcaaacagcaccgccacgccctgcgccgccagcgcataaattacgttatatatttcgtgcttagcgccaacatcaatgccgcgcgtaggttcatccagcaaaatgaccttcatctcttcgcttaaccagcggcccagaatggctttttgctgatttccgccactgagattcatgatcagttgctccgcgcccggcgttttgatgttgaggctacgaatgtggtgatcggcattgttttcttcccaaccgttgttgattacacaaccgccgagcacatgtttacgtctggcactgatgttgatattgtcgcgaacggagtgcacgggaataatgccttccgctttgcgatcttccgggcagagcatcatgcctgcggcaatggcgtggctcggtttacgaatatcgatcggctgttggtcgatataaacctgaccggcggtgatttgcgtcccgccaaacatgcctttcattaattcgctacgccccgcccctaccagaccaaacagcccaacaatttcaccactgcgaaccgccagacttattggcgtacgcacgcctggtgctttcacagcatcaagacgtaggcgctcctcgccataactacgcggttgccagccgtagatatcgccaatgtcgcgcccgaccatcgcctgcaccagcgcgtcgtggtcaacctgctacatatcggtaaaggttttgacataacgtccatctttaaagacagtaatggcatcgctgagggcaaatatttcttccatacggtgagaaacgtataagattacccgcccctcttttcgcagttcacgaataacgcggaaaagattgtcgatttcacgggcagagagggagctggttggctcatcaaaggcgataattttggcgttacgcgccagcgctttggcgatttcaaccatctgccactgaccaatggagagatatttcagcggcgtgtccgggtcaatatccataccaagatgtttaagttgtaaacccgcctcataattcagcaaactgcgattcacaatgccgcctttatgcggcagctggccgagatagatgttttccgcgacggtcatttccggcacgagatgcagttcctggtaaataatcgccacgcccgcgttaagtgctgcggtcgtgtcggaaaaggacatttcctgcccattaatcactacagaacccgtggttggcgcatagttgccgctgaggatttttaagagagtactttttcctgcgccattttcacccatcaacgcatgaacctgaccggcatagcagtcaaaactaatatccgtcagcgccttaacgccgggaaacgttttaccgatgccgcgaaaactgagatacggggtagactgttgcataacgtctccgtgaatcactggtcgttcacaccccctctgcatcatgcagaggggaatttttccggcaaattacttaccgcctaaaccttttttctccagttcttctttaaagttgtcacgcgtgatcagtaccacgtcggtaacttcggtaaattttggcggttcaacgtcttttgctacccagttgtaaagcatttcgctggatttatagccatgtacgtccgggcttggcagcagggaaccgtagaagccggttgcctgtgctttagacagttcgctcaccgcatccacaccgttaatgccaatgccgatgatatcggccgctttaaagccctgaccttccgtcgcgcgtacgccgcccagcacggtgctgtcgttcataccgacgatcagccaatgtttaacttccggatgttgaaccagcatactgttggcagcgtcaaatgcccccgggatgtcgttagatttggtaggtacctgataaatttgtttttccgggaatccggccgctttcagcgcatccatagatcccgtagtacggcggcgggcggtatccagttcgttggcggtaatcgccatcaccgcgctttctttgacatcccagccacgtttctgcatctctttatacagttcctggccctgacgttcgccaattttagtcgccgccatcatcaccagcggaacggtatccattggcttacctttggcgttaacaaactggtcatccacggcaatgactttcatatcgtagccacgcgctttcgcgacgatggcagagccgagtttggggtccggagtacaaataacgaaaccttttgcgccactggcagccaggctgtcgatcgcgttcaatgttttttcgccatccggcacggcaatcttaataacctcaaaccctaaatccttcccggctttatcggcaaacttccattcggtctggaaccacggctcttccggttgcttcaccagaaaaccgagcttcaggttctccgccatagcggattgactcataacggctgccagaccaatggctgccagggctttagtaaatttgtgcatggttctctccagctttagtgtcgttttgtgtagggcaaaaacgaatgacattcgttaaattaatcggaaaacaaagcattaccttttaactaaaagataagtgactgtgttgacatagttttagcgagaaattaattctccataggagagcaatatcacatcgcagaattacagtgagaacgtgcataaatttagcgggaaaagacataagggaaagccaatttgtcagacaaattgtcgaatgcacagcagattaatccataagattagcctggaaatccttgttgtctttggtacccatgcgggatgtcttctttttaaccagtcaataggccgcattacctggcgttgagtttttgaaatggtgtaataaccgcaactcaaagatgtggaaaatgcacgtcattcatttcgtcattaattatcactgtgctcattaattaacagaacacgtataatgagagccatctcgcaaaaatgaaaaaacgttttataaaatcatcacttcatcatgaattcaaattcattgattaatatcaacaagatacaaaaagcactatcattaaaattcattgcagttacattgatttcatcaatgaaatgtaaaaatatataaacttgatgatttaagcattttcttatacccgttcagacgttattcttatttcagatcatcgtcagaattgactccacgatcacatttcggaccggcagaaaggaattattctgcaaacagtaattatggtgttttgatttatcttgcacctctccacttctggatataaggatattaggtatggcaaccgctggaatgcttctcaaactcaactctcaaatgaaccgcgagttttacgcatccaatctctaccttcacctgagtaactggtgttctgaacagagtctgaacggcaccgccactttccttcgcgcccaggcacagagtaatgtgacccaaatgatgcgcatgtttaactttatgaagagtgtcggcgctacccccatcgttaaagccattgatgttcccggtgaaaaactgaactctctggaagaactgttccaaaaaacgatggaagaatacgagcaacgttctagtacgttggcacagttagccgatgaagcgaaagaactgaatgatgatagtaccgtcaatttcctgcgcgatctggaaaaagaacagcagcatgatggtctgttgctgcaaaccattcttgatgaagtgcgcagtgcgaaacttgcgggtatgtgccctgtgcagaccgaccaacatgttctgaatgtcgtgagtcaccagctgcattgatcatcatcggcgctaatgcattgcgccgatgaaggttttgagaaaccgctgcctcatctgtttgaagcagcggtttttttaatgggattcaccctgtggggtaaacttgagttcaataagcgcgatggctttttggattgcccgcatggtgaccgggtctgcggcggcgggatggttagtaaagtcgatattcttcagctgactggacattttttcacgaacttcaacgggcgcgattacatcgagaacatccagaatttgtttgataaccaactggcaagcaaccacatcagaaaccaattcctgatcggcattcagcggctgggacatcgtaaactcctgatagcattttgaaagccgttatagtagcgacttcacatcttcagcgatagtcacatccaccgtcatcaggacacaaaaaaacctgccggagcaggttttttgttatcggaacatattgcctggcggtacgtctttgaacgtcttgcaatagttattgaacatacttttcaggattttgcgcagtttcatcgcggcactccgaccatttgttatacaggtgttattgtctttgcgcttataatatgacaaccatcacaaaaatcaatctttatgtgatacaaatcacataaatacccctttaatgttataaaaatgataatcaaaaaacagcccccctatttctgacacctacagatggcaagaaatagcgcctgccaggcgtcttttccggccattgtcgcagcactgtaacgcgtaaaatagtgctttctcttactcttctggctggaccatgagacttctgattctgactcttagtttaataacgctggcggggtgtacggttactcgccaagcccatgtgagcgaagttgacgcggcaacaggtattgtacggttagtttatgaccaggcttttttgcagcatgcccataccgatcgttatgtcagtcgcgggatcgccgatcgcgcatgccagcaggaaggctatacccacgcggtcccctttggtcagccagtaggcaactgtagcctttttgcgggttccttatgtttgaatacggaattcactttgagttatcagtgccatcattccgccttccctgtctttctctaaatattttaatcagcgaggggatcttcgctgattaaagaaatagcggtaatgcgttttattcccattcgtatttttaataattgaagtttatattttaccttttgcaaataataaaataacaaattatagtgacgccacagcaacaaatataacctttgtggagcactatcatgctgaaaccagaaatgattgaaaaacttaatgagcagatgaacctggaactgtactctagtctgctttatcagcaaatgagcgcctggtgcagctatcataccttcgaaggtgctgccgcgttcctgcgccgtcacgcccaggaagagatgacgcatatgcagcgtctgtttgattacctgactgataccggcaatttaccgcgtattaataccgttgaatctccgtttgctgaatattccagtcttgatgaattattccaggaaacctataaacacgaacaattaatcacccagaaaattaacgaactggctcatgctgcaatgaccaatcaggactacccaacatttaatttcctgcaatggtatgtttctgagcagcatgaagaagagaaactgttcaaaagcattattgataaattaagcctggcaggcaaaagcggcgaaggtctgtattttatcgacaaagaactctctaccctcgacacacaaaactaatgctctccggcggcaggtttactgccgccgtttcaaatcagtgacggcaaatcttactctgatcggtgctaaaaccgtctttgctaggtataaatttgccttttgctgccagaaacgctaccagctctcccgctgtcatcccttctgcgctgcaggtgtgaaaacgtgcctgttcaccaaaacgcgctttaatcgcagcttccagactggcatgcgtatattgctcgccactttcaatcatcatatttaacacttcatgaccgtgaatagagtccatcgtccctcctcaaaaaaagcctagcgtagcgattgccgcttatgaagactttgcgccagcgcaggactgaatgctttttattgtacatttatatttacaccatatgtaacgtcggtttgacgaagcagccgttatgccttaacctgcgccgcagatatcactcataaagatcgtcaggacagaagaaagcgtgaaaaacagaaccctgggaagtgtttttatcgtggcgggaaccacaattggcgcaggcatgctggcaatgccgctggctgcggccggtgttggttttagcgttacgttaatcttgttgattgggctttgggcgttgatgtgctacacggcgctattactgctggaggtgtaccagcatgttccggcagataccggtctgggcacgctggcaaaacgctatctgggacgctacggtcaatggctgacgggcttcagtatgatgttcttaatgtatgctctgactgcggcatacatcagcggtgccggtgaattgttggcctccagcatcagcgactggacaggtatttctatgagcgcaaccgctggcgtgctgttgttcacttttgttgccggtggcgtggtttgtgtcggaactagtctggtcgatttatttaaccgttttctgttcagcgccaagattatttttctggtggtaatgctggtactactgctgccgcatattcacaaagtgaatcttttaaccctgccgttgcaacaggggctggctctgtctgcaatcccggtgatttttacgagctttggttttcacggtagcgtgccgagtattgtcagctatatggatggcaacattcgtaagctacgctgggtgtttataatcggtagtgcgatccccctggtggcatatattttctggcaggtggcgacgcttggcagcattgatagtacaacctttatgggattgctggctaatcatgctggattaaacgggctgttacaggcgttacgcgaaatggtggcctctccgcatgttgagctggcagtgcatttatttgctgatttagccctcgccacgagttttctcggcgttgcgttaggcttatttgattatctggctgatttatttcagcgtagtaataccgttggtggacggttgcaaactggtgcaattacgtttctgccgccgttggcgtttgcactgttttatccacgaggatttgtgatggcgctgggttacgccggtgtggcgctggcggtactggcattgattatccctagcctgttgacctggcaaagcagaaagcacaatcctcaggcgggttaccgggtcaaaggtggtcgtccggcgctggtggtggtgtttctctgtggtattgctgtgattggcgtgcaatttttgattgcggcagggttgttaccagaagtggggtgatcagatagcctcaaattccttattgggtgccagaattaacgctgacacccaatttggcctcttaatgcaggcagcactgcttaaatttcttaccactaccgcacgggcaaggatcgttacgccccggtttctcttctgctttgatcggttgctgaacagctttttcctgcggatgcgccatccagtacgcatgtagatcaagcgccgccagtcgaatggcatctacgctctcttcaaacgcttctgggctcatcttttctacccgctcgaagttttcctcagtaccgtgcagcgcaatcgcctccagcgctggttttaagctatcgggcaacgtactccagtcagaaagtgccacgccccgcatatagccaaagcaccactcctcaacaatcgtcagctcgctgccatcaacttctcgcaagccgaataacggctcaaactgctccgggaattcgttcagacgctctgcggtatcggccatatgttgaaaagccagattcataaagcgcgtcatctctttctcactcgcccagcgcggcacatagtcagccccaccccacacggcaaccagccactgttccggttcaatctcttgcggagaactcaacaccgccgtcaataaaccgtccagctccgccacatcaaggatggcgtggtcagtgttgtatttggtcagaatatcgtccagccattccaactcactttcgtttaacggtcccgttttcatacgcttttccttgtggatctcaactcgccagcacctatcttacatgccggtccgtatcagagatactttttgagtggctttgctggtgattaaaaattaaggagggtgtaacgacaagttgcaggcacaaaaaaaccacccgaaggtggtttcacgacactgcttattgctttgattttattcttatctttcccatggtacccggagcgggacttgaacccgcacagcgcgaacgccgagggattttaaatcccttgtgtctaccgattccaccatccgggctcgggaagaaagtggaggcgcgttccggagtcgaaccggactagacggatttgcaatccgctacataaccgctttgttaacgcgccaaattcttcaggcctttcagccagacatccgcttgacgccgatgtcttttaaactggagcgggaaacgagactcgaactcgcgaccccgaccttggcaaggtcgtgctctaccaactgagctattcccgcattcatcaagcaatcagttaatcacttgattttattatcgtctggcaatcagtgccgccgttcgatgcgttgcattctacttacctggcgcgatgagtcaacgatatttttcaccacttttgatcgtttgctgaaaattacgccgaaacgatcactgatcaagcaaatctgcacgcgcagcgctcaaatattgcaacatactccacagagtcagtaccgcagccacaaagaaaagtgcaataccggcgtactcaacccaaatgttcggacgccacagcagccatgccaacgccaccatctgggcagtggttttcactttcccaatccaggagacggccacgctactgcgtttacccaactccgccatccattcgcgtagcgcagaaataataatttcacgggcgatcatcgttgccgccggtaatgtcacccaccagctgtgataatgctcggttaccagcaccatggcgatagccacgagaactttatctgccacagggtcaaggaaagcaccaaaccgggtactctggttccagcggcgtgccagaaaaccatcgaaccagtcagtcaccgccgcgacgcagaaaatgagcgcggcggcaaacgggctccaggtgacaggcagataaaagaccaatacaaagaatgggataaggatgacacggaacagtgtaagcaacgtagggatattaaattgcataatgacgggtaactatctgttgtcagtaagattacccctatgttgctacagagacatcaatgtttcaagctccagaagatcttttctgccagaccttggctaatacccggcacttttgcaatttcctcgacgctggcgttacgtaaaccttgcaaaccgcccatatatttcaacaacatttgccgacgttttggcccgacgccttcaatggtttccagggaactggtatttttgaccttcgcccgttttttacggtgcccgccaatcgcgtgatcatgactttcatcgcgaatatgctggataacatgcagcgcgggactatctggcggcaaactaaatccctcaccttccggctcaaagaacagcgtttccagtccagccttacgatctgctcctttggcaacgccaagtagcagcggatgatttttatcccaactgacatccagttcggcgaagacatttttcgcctgcgcaagctggcctttgccgccgtcgataaggatcacatccgggatcttactgtcgtcaatggctttaccataacgccgacgcagcacctgattcatcgccgcataatcatcgcccggcgtgatgcctgtaatgttatagcgccgatactccgcacgcagcgggccgttagcatcaaacaccacacaggaagcgacggtttgttcgcccatggtatggctgatgtcaaagcactccatccgcttcacttccggcaatttcaacacgctggcaagcgcggtcagtcgctggtgaacggtagattgctggctaagtttgctggttaaggccgtcgccgcattggtgcgcgcgagtttcagataacgcgccctatcgccgcgaggtttggtttgaacattaatcttgcgtcccgccagttcactaagggaatcggcgagcagcgttttatcgctaagattaaaatcgagcaggatctcacccggtaaggtgcgcatctggctgccttgtaaatagaactggcctacgaaggtttctaccacctcgctcagttccgtaccgccaggcactttcgggaaatagctgcggctgccgagcactttgccctgacgaatgaacaatacgtggacacaagccatgcccgcatcgaacgccacaccaataacgtcgaggtcgtcgccggtattggaaacgaattgtttttcggtgacgcgtcgcaccgcctgaatttggtcgcgaatacgtgcagcttcttcaaactccagattctggctggcagtttccatacgactaatgagttgcgtaagcacctgatcatctttgccagacaaaaacaggcgcacatactcgacctgctgagcgtattcttcttcactcaccagtccttcaacgcacggtcccagacagcgccctatctggtattgcagacacggacggctgcgattgcgataaacactattttcgcactggcgaatggggaaaatcttttgcagtagcgccagtgtttcacgtacggcatagccattcgggaacgggccgaaatattcacctttggcatgcttcgcaccacgatgcatcgccagacgcgggtgggtatcaccactcaggaagataaaaggataacttttatcatcgcgtagcaaaacgttgtaacgcggctgatagagtttgatgtagttgtgttccagcaacagcgcttcggtttctgtgtgagtaaccgttacatcaatttgctggatctgggcgaccagcgcttcggttttgcggctagcgaggttgctacggaaatagctggaaagccgttttttcaggtctttcgctttgccgacatagataaccgtaccaccagcatcgtacatgcgataaacgcctggctggctggttacggtttttaaaaacgcttttgcgtcaaactgatcactcactgactacttaatgtctccgcattacacagaccatggcgaattgccaggtgagtcagctcaacatcgccatgaatgtttagtttactgaacatacgatagcggtagctgttcaccgttttcggactgagattgagctgttcactgatctcattgaccttctggcccttggtgatcatcagcataatctgcaattcacgttcagacaaactggcaaatgggctttctgttttttctggttcgatctggcttaacgccatttgttgagcgatgtcagaagcaatgtaacgctgcccactatagacagaacgaatcgcactcacgacttcctgcggagccgcgcctttgctgaggtagcccgcagcaccggcctgcatgactttcgctggtaaagggttttctgtatggacggtaagcatgatgattttgacatcagctgtggaacgcgcgattttacgcgtcgcctcaagaccgccaatgcccggcatactcatgtccattagcaccacgtcaacggcatttgtccggcaccacttaacggcgtcttcaccgcagcttgcctcaccgacgacttttataccctttatatcttccagaatgcgtcgtatccctgcgcgcaccagttcgtggtcatcaacaagtagaacgttgatcaaaggaatatctccagaaatagggataacgctactgatagttagtcattcgtatattagcggtttttattgcaactttgaaacgttaaaaatggtgggtattcgatttttctctcgtttttgtcaattcgattgtccacagttatggtcacgcccgtcaccaacggcttaccggatcgtttcacagtaagccctacgatgaaatgtgacaaaaattgactttattcagcaaaaatgaaaatcagcccgctgaatatgtaacattaattaacccgaacaatacgggcaaaaaacattcatgataaaaatatttattggtcattatattaacgtattttatagcactgccgatatcacgctcaaaaaacaaccactgctatttttagcaaagcttatggtatactccgccgccttaacatttttcaccgcaaattttcattgcaacatgacgaggaaaataaatgagtacgcctgatttttctactgccgagaataatcaagaactggcaaatgaagtctcctgcctgaaagcgatgctgacgctgatgctgcaggcgatgggacaagctgacgcgggccgcgtgatgttaaagatggaaaaacagcttgcgctgatcgaagacgaaacccaggctgcagtattttccaaaacggttaagcaaattaaacaagcctaccgtcagtaatataaaaccggctgatagcgtgcctttcagccggtttttgcatctggcacgcaggacagaaaagagatcaaattaagccagtagcggccgcgtaacaggcaacctgggtcttatttggtgcattaatttttttctgcatgtttttctggtggaaattgaccgtattctcagagatactcaaaatcatcgctatctctgcacttgttttcccttccgccgtccacctcagaatttctttttcgcgcttgctgaaattcatctctggcgtcatcactatttcatcatttaaacgcatcagagccatcagactttcgcgcaccagtaactgcatttttaattgcagttcatcactaagaatgggtatttcgcgcgcgctgcaacgggaaaaggacaaaaagcccagcgcccggtttggcagcattaaatactgagtgacaccgcggcgtaaaccatgtgcgcgcgcggcttcccataacggctgtgcttcgctgaataagtcatcattccacattaaatggccctgactaaagttttcagggttcagcaccggatcaattgcgagaaagttttttgcctgataataactaacccacgcctcagggtaattggtgtaaaaagccactttaggtcgagtgaatggtaccgggtggcggacacataagctatagtaatcgtactccagctgctgagcctgaagctcaatttcatggtagacctcttctgcggtctccatcctctgaaaacgcaacagcatcgtgcgacgccagctgaaaaaatccttatcctgcatagtaaaccgcaacgcccttgagagtgagtatcatttataatgataattcaaactatcacataaataagatttatatataatttatattattcaggcaatgaattacttttgcaagccatcgcattctcttatgttattaatgagttatgctgatttgttaagcagttttatcaggcttgaaatggcgtccagccccgacaggtgaatcgtcggggctgattttttcttattattgcagcagaaacttctcgaggaactggcgggtgcgaggctgctcggttccgtaacgtttatcatgttatcctaaggattatccgaaaaataatacctacgaacatcttccaggatactcctgcagcgaaatatttgttttaagctcactcacatatcgcaacatttactttactttaagacaattccaggcaaattatacaacactttacgggatagtaagtccgcctgaaaaatcgcgagagtggcgcattaggtgacccatgttgttccgtttagtcatgatgaaatattcaggtaaggggaattatcgttacgcattgagtgagggtatgccatgagtacgattattatggatttatgtagttacacccgactaggtttaaccgggtatctgttgagtagaggggttaaaaaaagagaaatcaacgacattgaaaccgttgatgaccttgccatagcttgtgatagtcagcgccctagtgtggtgtttattaatgaggactgtttcatccacgatgcttctaacagtcagcgtatcaagctcatcattaatcaacatcccaatacgttatttatcgtttttatggcaattgccaatgttcattttgatgaatatctattggtcagaaaaaatttattgatcagttctaaaagcattaaaccggaatctctcgacgatatccttggcgatattctgaaaaaagagacaacgataaccagctttttaaatatgccgacgttaagtttgagccgaaccgaaagcagtatgttgcgaatgtggatggcaggtcagggaaccattcaaatctctgaccaaatgaatatcaaagccaagaccgttagtagccataaaggtaatattaaacgtaagatcaaaacgcataataaacaggttatctaccatgtcgtccgactgacggataatgtgactaatggtatttttgtcaacatgcgctaacacattctgactggtggtttcccaccagtcaggctgaataagattactctgctttctccacaaagataccgtcctgatgccctgcttcattaaagaaccagatgccgagcgggtagtcttccaggctaaccaggtacattgtgccttcactaaactcctcaactgccagtaccacgccaggacgacgcggaccgccatccgttttgactgttacccgatcattcaccttcatcgttttcctcctgtggctttgtgccagtgtagaacaatttcgtttttctggcagcgccaggcgcgcgcgagtgctgattttctcgacggtctatacttaagagatgccaggcggacttaacgactggcggcaacaacagagtaacggttgcgaggaaagatgatgaaaaccgcaaaagagtacagcgataccgcaaaacgtgaggtcagcgtcgatgtcgatgccctgctggcggcgatcaatgaaattagcgaaagcgaagttcatcgcagccagaacgattctgaacacgttagcgtcgatggacgtgaatatcatacatggcgtgaattggcggatgccttcgaactggatattcatgacttcagcgtctctgaagtgaatcgttgaatgcacaataaaaaaatcccgaccctgagggggtcgggatgaaacttgcttaagcaagaagcacttaaaaaattcgttacaccaggaaatctgatgtgttcatcaccttatccgcaatttttttcgctgacaagaaaatattcgccatatgaatgattaacgctacttatgaatagaaatgtgacgcacgtcaccccttggtggctctggcgtcagcgggatcgctcccgaaaaaatcatctttgataatttgtgcggttttgagaatcatcctggtaagaggagtactgcgcgactatgtttagtattcaacaaccactactggtttttagcgatcttgatggcaccctgctggacagtcatagttatgactggcaaccggcagccccctggctcacccgtttacgcgaagcaaatgttcccgtcattctctgtagcagtaaaacaagtgcggaaatgctgtacttgcaaaaaacgttggggctacaaggtttaccgctgattgccgaaaatggcgcagtgatccagcttgctgagcaatggcaggagatagacggttttccacgcatcatcagtggtattagccatggcgaaatcagcctggttttaaatacgctacgcgagaaagaacattttaaattcacgacttttgatgatgtcgacgatgcaaccatcgccgaatggacgggattaagccgtagccaggcggcgctgacgcagcttcatgaggcgagcgtaacgctaatctggcgcgacagtgacgagcgtatggcacaatttaccgctcgtctgaacgaactgggcttacagtttatgcagggtgcgcgcttctggcacgtactggatgcttctgccggaaaagatcaggctgccaactggattatcgcgacctatcaacaattgagtggcaaacgcccaaccacacttggcctgggcgatgggccaaacgatgcgcccttactggaggtaatggattacgcggtgattgtgaaagggctaaatcgtgaaggggtgcatctgcatgatgaggatccggcccgcgtctggcgaacgcagcgtgaaggaccggaaggatggcgtgaagggctggaccattttttctccgcccgttaagcgttatcgctcgcgaatacccgattacgcccagcctgtttagcgagataaagccgacggtcggccagactctggagttgttcaaaatcataatcaccggtttcctcgctgctgcttacccccaggctggcactgatgcgtatcgtcgtactcttggcgatcaacatctctttttcatttaatttcagtcgaatacgttctgcgacctccgcagcctccgtcagactcgcgcctggcagaatcacacaaaactcctcaccaccgacccgcccggcaacgtcctgcgcacgcaaggaactgctaattaatccggcagcatgagaaagaacacggtcgcccgcctgatgaccaaagcggtcattaatcgctttaaaatggtcaagatcgacctgaatgacagaaaaaggatgttggtgcgtctgacacaatttagcgagcggacgggctttttcgaacagtgcgccacggttatataaacgcgttaaggtgtcgtgccacgcctgccactgcaagctgctttgcagaacatacatgttgctaaccatccggcgaatcacataccaggagatgagtaacatggtggtaaagagcgcccacagcagggttaatgcaatgctgatactgccgaaatcgccgcgcacgccttcgcttaacgtatggacacgcaccagcacaccgtcgaaatggtccagacgttcccagctaacatagcgactgtccatacgaatgccgccccgcgtgtcatgttccattgcctgcgccagcaaggccagttcacgaggatcaaaaatattccctgttggatggtcaggattggaagaggtcaaaaatctcagcttactgtcatagagctgatactcaccatcgaggtttttatcgatggcgtttcttaaaaattgctgcatagtacgcacgggaatactcatccccagcacgccataccagtagttattactgtctaccggaacactgacggtaacctgcggttcagtattgctggcgtgttccggttggctagtgaaccagcgtaccgcgcggtgacgattttctcgttgactatggccaataaaccagggttgggtgacatagccgtaataacgcgttggaacattgcgcgtaaacaaggtcggctgcgtgctaacgtaaaatccggcacggctgacatacatcgcctgttcaaccatgctgctggagttgtgcgctagtcgcagcaagtaaccaacttccagtgcagcggtaatttcattgtcgaggctttcattttcgcgagacaggagattcccctcgctgactaatgcatcgctcacaccattaactggcagagtgcgtcgtcggttgagttcgattttccaggcgtgctcgtcgcgatgctgttcgaactcggttacagcatcacgcagagaggtgaaatccagtggcgctacgagagcttcgcgcatgccattacgtaaaaagatcagtttgtcgacgttatactgcaaatgcttatcgagcgcgttggcaacgttttccagatgattacgctggctggagatataggcatcttccagcaccaccacttcacgccaggtgagcaaggtggaaaaaagcaataccacgataaagcagagattaacgacatgaccaggccccaggcggcgtgcgagttttttcaaccagctctggttttccatttttgtctcgtgctgcaccctgacgactcccaacctgcttttttatgattctggcataacctggcgatagcgtaccgcaaaacagcgataattttataatggtggcatgataagacgcgactatcattcattgcaggcattagcacaccaggccggatgtgatccggcctgatgttaatgataccctttcacacttcttccgcagaacgactcccctcccccggaacaagctcggtttcatgaaaagcttcccgcttgaccccgtaaccgtcataccaacgacactcaaccataccgctggagtatccagtgacaatcatccgcgggccgccctctttaaccgtaacttcctcactaaccataaagctcatactcgcctccttttttcgagtgaaacttgttcaccttagttgaagatggcgaattttgcataatagccagtgcgagtattaatgtgcctgaccgcgcattttctctacggctttcactcccagcaccacgatgccgccgatgataaatccaagaatcagatttaaaacagtcggtaatatcatcgccactactgcactttgctgcccggcgaaatgttcaatggcgtgatgcagcggcgcaattccatgtaccacaatcccaccgccgacgaggaacatcgccagcgtgccgacaatgcttaacgctttcatcagccagggcgcgataatcaataaccctttacctaatgcctgcatcagcgcgctggatttttccgccagccaataccccaggtcatcaatcttaacgataacccctaccagaccgtagacgcccacggtcactaccagcgcgatgccactaagcaccagcacctgattaagcaacggcgcttcggccacaatccccagcgtgatggcgacgatttccgcagacaatataaaatcggtacgaatcgccccttttattttgtccttttcaaacttcagcggatcctgcgccgccagcttctccagacgctgctggctctgcgccggatcttctttatgtttacgcgcctccagcatatgcagcactttctctactccttcaaagcagagaaacgcgccaccaatcatcaacagaggcgtaatcgcccacgggataaacgcactgatgatcagcgccagcggcaccagaatcactttattaatcaggcttcctttcgccacgccccagaccacgggaagttcccggttggcccgcacgccactaacttgttgcgcattgaggcttaagtcatcccctaatacaccggcggttttcttcgccgccagtttgcccatcacggagatatcgtccagtagtgtggcgatatcatcgagcaacgtcagtaaactactcccggccaaaagcattccctctcatttttattgttgaagggtgtaagtatgaagcaaaaacggcagctctgatacttgcttcacaggtcaacatttttttaacaatcaagtgcaattatatctctcgccagcagaatgattttcacgtttactatgaaccacctttttatttccaccgtgagggattatgcgtttccgccagttgttaccgctttttggcgcgctgtttgcgttgtatatcatttggggcagtacctattttgtcattcggattggcgtggaaagctggcctccgttaatgatggcgggcgttcgattcctggcagccggtattttattgctggcatttttgctactgcgcggacacaaactccccccgctacgtccgctgctcaatgccgcgctgattggcctgttattgctggctgtcggtaatggcatggtgacggttgccgaacatcaaaatgttccttccggcatcgccgccgtagtggttgcaaccgtgcccctctttaccctgtgcttcagccgcctgtttggcattaaaacgcgcaaactggaatgggtgggtattgccattgggcttgccggaatcatcatgctcaatagcggtggaaatttaagcggcaatccgtggggcgcgattctgattttaatcggcagcattagctgggcgtttggcagtgtttatggcagccgcattaccttacctgtagggatgatggcgggtgcgattgagatgctggcggcaggcgtggtgttaatgatcgcgagcatgattgcgggtgaaaaactgacggcgctcccttcccttagtggcttccttgcggtcggctatctggcgctgtttggtagcattatcgccatcaacgcttatatgtatttaatccgtaatgtcagtccggctctcgccaccagctacgcttacgttaacccggtggtcgcggtcttgctgggtacgggactgggtggagaaacactgagcaagattgaatggctggcgctcggcgtaattgtcttcgcggtggtactggtcacgttgggaaaatatctcttcccggcaaaacccgtagttgcgccagttattcaggacgcaagtagcgagtaatcaagcgagtaaatgaatcccctgcgtgtcgatctgcgcgctggcaccttcgccgcagatccactcttccagacgctcggtaagcgcttcatccgtcagcttctcgcgcccacgtaacgcgcactcccagacaatcaatacgcgccagccgagttcctgcaagcgactgatatcgcggcgatcgcgctcaacatttttacctatcttctccagccagaactcggttcgagtcgcaggcactttaaacagatagcagtgatgatgatgccagaagcagccatgggtaaatatcacgcagcgatattcatcaacgacaaaatccggacgtccgggcagactggcgtcctgaacgcgaaatgccaggccctgcccggttaacagactggcgaggcgcttctctatcgccgtatcacgcgtggcaatcgcgcgcatatttttgctgcgagtggccttatcgtgaacgtcggccatgttgtgcctcttgctgacgcttagttatcgactacgtcggccatgttgtgcctcttgctgacgcaacgccaccgcctgtttgatttttggctcaagcagttttgccaccgcggcaaagaccggcacgaccacgctgttaccgaactggcgataggcctgagtgtcgctaaccggaatacggaatttcgcttctcccggcgcttcaaaacccattaagcgcgcgcattcccgaggcgttaaccgacgtggacgatgttgctgattcagcggatcgtcaaagtctttctcacccgtggccatatcccagccgcgatcgattaaaatttccgcgccatctttgtaataacgcgcagacagcgtacgcgtgacgctttgcggattgttcggataaaccattccataaccgaagccgttaccgcgcgcctgatgttttttcgcatatcgatagaggtacttccacagcaccggcgtcaggatatatttcgcctcgaccatcgggtccaacagctgcgccagcgtcactcgctgcgcagggaaacattcgctgatatcacgcagggtaaaatcggctttcagattcagatcgcgacgaaaacccaccagcacgatgcgttcacggtgctgcggcagaaaatgtttgccgtcgatgattttcggatcgtctggcccattatcttctgcatcagccacgtcatagcccagttcgtccagcgtctgcatgatgatgcggaacgttttaccctggtcgtgacttttcaggtttttgacgttttcgagcacaaacatcgccggacgacgcgcgtcgataatgcgtaccacatcaaaaaacagcgtgccctgggtatcgcaggcaaaaccgtgcgcccgcccgaggctgttctttttgcttacgccagccaggctaaatggctgacaagggaaaccggccagtaaaacatcgtgttcaggaatgtgttgacgaatatgttccgccgccgcctcatcactcacgccttctttatggctgagggtgatgtcgcggatatcttcattaaaatgatgcgtcgccggatcgcaataatggttggctttataagtgcgtaccgcatgtttgttccattcgctggtaaacacgcactgtccgccaatgctttcaaaaccgcgacggatgccgccaattccggcgaatagatcgataaagcgaaacgcataatgcggatgatgtgccggtggtttgggtaataacgtttgcagatgggcgaactctttctcacttaaacggtgccatgcgctgtcattcgccagcgcacgttttaaaattgccgcgctccagtgattctcacctacaccattaagctgcgccaccaacgttttaacatcataaatttgcagcagtttctccagcattgcctgtgcggcattcccggtgctgtaactatcggttacacttatattttcctgcatagatttcaccggccatctgagatggccgacaggttaacataattacagccatttagggccacgcgctcagccagcggaactaaacgcatctatcaccttgtgatcgacaccttcattctcccccgccagttcggcactgagcttcgccataaactcgactaaaaaatgcgcgttgtgctgcgccagctgcttgcctcttgcggtttgcatggtttgcggtagcttcagcaacttagtctggaaatgatccagcgcgtagcgtttatcatcaagcgggcgatgctgtgcgaacggatcttcaccatcaaacagcgccacgcccaatgccccactaacggcaaacacgcgcgccaggccaatcgcccccagggcttccagccgatccgcatcctggacaattttagcttccgttgttaagggggcgatttgcgcgctgaaactgtgagcggcaatggcatgacaaacggcctcgattttctccgccggaaattgctcgaactcttcacggagcaggcgacgcgtctcttctgccgccaggatactagaacgctgcctttgcggatgatttttcgccaggctcacaatatcgtgaaaataacaggcggttaaaatcaccagcatatcgacatcgtcatctgccgccagcttctgtgccgtagcccagacgcggcgaaaatgacacacgtcatgggccgcgtcctggtgctgatgatggtttttcaaccagttttcgaactgtgcctgccagtgttgtaagtccatacgcgctccgttgccaaagagtcgccaccttagcagtttttattcatagcgtctgctacgtgcgggacgaggtcgggtgtaccaggcaatgctgcctaacaatgccccgaccagagccataaataaaaatccgaccagtgcccctaaccactttcccgcggtagagcctaaatcgctttcaaatccgctcacgggggcatcgggaatccggctcatcacccagatgtaacgcgccattgcccagacgaaatagccacaccatgtatagaaagcccacaaagccagtttgccgccagggctgcgagagagtctctcttccatctttgtgctaccgtattccattttgagataacccggaaaattcagacttagtactattatgtgataaaagtcacatttttccacattggatgagccagtcaagactcaatcattttttgaacaaatagataaattttgcgcaacggcagtgaatacaggaaaaatcgttttgagcgattttatttatctttgatatcggctttattaattcatttaatcaatatattagcactgattacaattatacctttttattattctgtgtcatgatgcttccgttattagccttttatcgtcttgtttatattttttgggccggcatgatgccggctttttttatgccttcattaatgtgcgcctgatcacaccagccgtttggcgcaacaatcattgataccccctatgtttccgctcaactcataacatattgatatacatttataattttcatgaatatttatatttagaattcataattatgaattatattaaatagattagaaacattttgatatcttttaaatacatttgttacatgtaatccttaaaataaaatgaacttcatagaatagtatccaaatgtgctttttttggataacggcacttattgatatattcatgaagattataatcacaagggaatacataatgaaaagaaaagttctggcaatgctggtcccggcgttattagttgctggcgcagcaaatgcggctgaagtctataataaagatggtaataaactggatttgtacggaaaagtagtgggtctgcactacttctctgatgattctggcagcgatggcgacatgtcatatgcccgtatcggtttcaaaggtgaaactcagatcgctgatcaattcactggttatggtcagtgggaatttaacattggcgcaaacggtcctgaaagcgacaagggtaataccgcaacgcgtctggcatttgcaggtttaggctttggtcagaatggtactttcgactatggtcgtaactacggtgtcgtatatgacgtagaagcatggaccgatatgctgccagaatttggtggcgatacctatgctggcgctgacaacttcatgaacggtcgtgctaatggtgttgcaacctaccgtaacaatggcttctttggttaggtcgatggcttgaactttgctttgcaatatcagggtaataatgaaagtggtggaccattcgggcaggaaggttccggtagtggtgatggccgtagcctttccaaagaaaatggtgatggtttcggtatgtcaacatcctacgacttcgacttcggtttaagtctgggtgctgcatatcaaactctgatcgttcagatcgtcaggttggagttggtttaaatgatcgtaaccatagcaacagaaatgctggtggtgaaaccgctgaagcatggactgttggtgcaaaatatgatgctaataatgtgtatttagcagctatgtacgctgaaactcgcaatatgaccccatatggtggtggcgagtttgataatggtgaatcaagatcagccatcgctaacaaaacccaaaactttgaagttgttgctcagtatcagttcgactttggcctgcgcccgtccatcgcttacctgcaatctaaaggtaaggatttaggcggttgggctcatgacggcaacggcgacccacgttacaccaataaagatctggttaaatacgttgatattggtgcgacctactacttcaacaaaaacatgtccacctatgttgattacaaaatcaacctgctggacaacgacgatgacttctacgaagcaaacggcatcgctaccgatgatatcgttgctgtgggcttagtctaccagttctaatcagtcaactcgctgcggcgtgttactgtaaaactgaacactagcctgagttcgtccctcatcgaactcaggcttttttattggcatttcatctccatctgcggcacacgcaattgccgaagcatatcgatacagcaccttaccctgcccctcctggcacaataacatcaaccagctactcttcaagctaacacccaaatgcatttctttatgaattaatccgtaacaaacacgcttcccatatagaaatatttgcaaaaatagtgcatgaaataagctttttctctaccaatccgggatataaatattcatcagcaccacaatattccacagcactaaatctctccccgccaccccgtacctctgataatggtctaaaatcattgaagccacttgcgacgacgttgctcaataaggaaaatttggcgtgaataatattcaacaccagtgcagcatcatcattacatacttacagccgccgactaccgctttcgatatattgactcaattttccagcctggttaaaaatagcgaccagctcagtcgcaaatatagtgactaccctaactaagcaacaataaggaatacactatgactgttcaaacaagtaaaaatccgcaggtcgatattgctgaagataatgcattcttccctagtgaatatagccttagccaatataccagtcctgtctctgatcttgatggcgtggactatccaaaaccttatcgcggtaaacataaaattctggtgatcgccgcggacgaacgttatttgccgaccgataacggaaaactgttcagcaccggtaaccatccgattgaaacgttgctgccgttgtatcatctccatgctgcaggtttcgaattcgaagtggcgaccatttccggtctgatgaccaagtttgaatactgggctatgccgcacaaagatgaaaaagtaatgccattctttgagcagcataaaagcttgttccgcaatccgaagaaactcgcggatgttgttgccagcctcaacgctgatagcgaatatgcagcaatctttgttcctggtggtcatggcgcacttattggtttacctgaaagccaggacgtggctgccgctttacagtgggcaatcaaaaatgaccgttttgttatctccctttgccacggcccggcggcttttctggcgcttcgccacggcgataacccactgaatggttattccatttgcgcattcccagacgccgcagacaaacaaacgccagagattggctatatgccgggtcatctcacctggtacttcggcgaagaactgaagaaaatgggcatgaatatcattaatgacgacatcaccgggcgagtacataaggaccgtaaacttctcaccggcgacagtccttttgcagcgaatgcgttgggtaaactggcggcgcaggaaatgctggcagcttacgcgggttaatccctgttacgtttgaatgtaagcgcataatcaatcgcggccgcgttagtactcacgacgtggctgcgttttttcacggttaatttatggcgtactgaagccctatgttaatttctttgcggtaacgtaatccggaacacattatgcttattgagatagtgatacgtagcacttcccccatgcaattcggcaatcgctttgactaaagaaaggcctagtccctgacctacggaatgacggctattatctccccgccaaaatctacggaagagtttttcaggctcattaattttcgttccagggctggcgatatcaatattaagatagctgttggtatcaagaaaactggttatatgaatacggcttttttctgggctatatctaatggcattaacaataagattgcttaacattcgttgtagtaaaattttatccgcaaagatttgctgattgcactcgaccttaaagcaaatctctttctcgtcactaaggtattcaagatagtccaacaaattttcgacttccttattgagagaaaggctgtccagtttcaccaaaacattgtttttatctgccctggcaagaaacagtatgttctctgttaaccggctaatattttccagctcttcaatgtttccggcaattgttttttgatattcagcgatacttctggtttgactgagcgtaacctgattctgacccagtaatgcattaattggcgttctaagttcatgagcgagatcgtcagcaaactgacttagacgctcaaaatctttgactaaagcatgatgcattttattcaacgcctgcccaagaggttttagttctctcggtaatgcgctaacctcaacaggctctcggctatcgttataattcagcgcttccgttacaccactcaactttttgatctctcgtaatcccgttctgattaacagcggacttaatacactgcaaagtacaatggcgacaatgcaaattataatgctattaattttatactgttcaagcatgttatgtctggcactagccaatttagccacagtaaccgttaaacttgggctaacttcatcaatattaattcgtaaagcatctatctctgtatcattaataatgcttctgtaaatgccagctgcgctgattgtctcactagcaggtatgttatttaacatgccatcactgacatttgtccggttaacaattttattgatgctatcaccatgaataatcaagatatcctgactaacatccatcatccggttaaagtacacaggtaacgtatctggatttaccccatcaattaacaactgcttgatctgcgctgtccggttaatgagtgttgtatcatcgcgccatttcaactcacttgccaggccattatagagagtccagacaattccggcgccagcaacagacagtagcaatataaaaagcaaggttaaacggacggttatagatagtcttttcattatttttttaccgctacgaaactatagcccatcccccggattgtggcaattagcttttcaggaaaaggatcatcaacttttgcgcggagcctgcgaatggcgacgtccaccgtattggtatcactatcaaagttgattccccaaatttcactcgcaataaccgttctgggtataatttcgccagctctggaggccagtagccaaagtaactgaaactccttgcgcgtcagtgtaatactgatattgtccctgctcacactatgactaacagagtccattcttaagccgctgatttctaatgtactattcaaagcgtgatgttgccttaattgtgcccgaacccttgccagcaactcagaaaaactaaaaggttttaccagataatcatttgccccactgtccagccctctgactctgtcatcgacagaatcccttgcagtaaggcaaataacaggggtttgctttgctgttcttaacgtttgtaagatctgccagccatccatacccggaagcataatatccagaatgatcaatgcataatcatccttcagcgcaagataaagcccatctctgccatcagaaacggcatcgatgacataacccgcttcggaaagcccctgcgttacccattcctgggtcctttgattatcttcaataagtagaatcttcatgaaaataatatgccataaatcatatgttatagaaacagcctggttcattacaaaattgtaatgctgctgtaaggttaccctggacgctttttcgctatcctcaaaactcattcacatgacaaggatataaacatgttaaagcgttatttagtactcagcgtagcaacggcagcatttagtttaccttctttggttaatgccgcacaacaaaacattcttagcgtgcacattttgaaccagcaaacaggaaaacccgctgctgacgtgacagtcactcttgaaaagaaggcggataacggctggttacaacttaataccgccaaaacagataaggatggacgaattaaggcactgtggcccgagcaaactgcaactacgggcgattaccgtgtcgtatttaaaaccggggactatttcaagaaacaaaatcttgaaagtttcttccctgagatccccgttgaatttcatattaataaagtgaacgagcattatcatgtgcctttattacttagccaatatgggtatagtacctatcgtggcagttaatgcataaatatgtaaaagcagatctctgctactgttagggaggacactccctgacagattaacagtaaacggctcttgctggctaacgacaaaaaagtgtgatggcttatgaaaaagaatcaatttttaaaagaaagtgatgttacggccgagagcgtattctttatgaagcgtcggcaggtgttaaaagcactgggcatcagtgcaactgcactttctttgcctcacgctgcgcatgccgatctgcttagctggtttaaagggaacgatcgcccgcccgcccccgccggaaaagcgctggagttcagcaagcctgccgcctggcaaaataacctgccactgacgccagcagataaagtttccggttataataacttctatgaattcgggctggataaagccgatcccgccgctaatgctggtagcctgaaaaccgatccatggacactgaaaatcagcggcgaagtggcaaaaccattgaccctcgatcatgatgacttaacccgtcgcttcccgctggaagagcgtatttatcgtatgcgctgcgtggaagcgtggagcatggtggtgccgtggattggttttccgctgcacaaattgctggcgcttgccgaacctaccagcaatgcgaagtatgtcgctttcgaaacaatttatgcaccggaacagatgccaggccagcaggaccgctttatcggcggtgggctgaaatatccttatgtcgaaggattgcgtctcgacgaagcaatgcatccgctcacactgatgaccgtaggtgtttatggcaaggcgttaccgccacaaaatggcgcgccggtgcgactgattgtgccgtggaaatatggctttaaagggattaaaagcatagtcagtattaagctgacccgcgagcgtccgccaaccacctggaatctggcagcgcctgacgaatacggtttttacgccaacgttaatccgtatgttgatcacccgcgctggagtcaggctaccgaacgatttattggtagtggcggcatcctcgatgtacagcgccagccaacgctactgtttaatggttacgccgcccaggtggcaagcctgtatcgtggcctggatttgcgggagaatttctaaatgcgtctgacagcaaaacaggtgacatggctgaaagtttgcctgcatcttgccggattgttgccgtttctctggctggtctgggcgatcaatcacggtggactgggtgccgatccggtgaaagatattcagcattttactggtcgcactgcactgaaatttttgctggcgaccttgttaatcacccctctggcacgctacgcaaaacagccgttattgatacgcactcgccgcctgttaggattatggtgctttgcctgggcgacactgcatttaacaagttacgcattgctggagctgggcgtgaataatctggcgttattaggtaaggagttaattacccggccttatttaacgttaggtattatcagctgggtaattttgcttgctttagcgttcactagtacccaggcgatgcagcgaaaactcggcaagcactggcaacagttgcataatttcgtctatcttgtcgcgattctggccccaatacattatctgtggtccgtgaagattattagtccgcagccgctcatctacgctgggctggctgtactgcttttagccttacggtataagaagttgcgttccctttttaaccggttacgcaagcaggttcacaacaaattatctgtataacttcatattgccgacaaagtacgcgttatccctgccggatgtggcgcgagcgccctatccggcatacacagatcgcatcaggttatgtttcgtttgtcatcaacctcaaatcaccaaaataatttattttatttcaataagatagataagtagaactgagaaagccatgctctcgtttcctaagagttgttgcattttgctatatgttacaatataacattacacatcatatacattaactctggaggaaactgttttggcgattcgtctttacaaactggctgttgctttaggtgtctttattgttagcgctcctgcctttagccatggtcatcacagtcacggcaaacccttaacagaggtcgaacaaaaagctgctaatggtgtttttgatgatgccaatgtacaaaaccgaacgctcagtgactgggatggagtctggcaatccgtttatcctttactgcaaagtggcaaacttgaccccgtctttcagaagaaagcggatgcagataaaactaaaacatttgctgaaattaaagattattatcacaaaggttatgcaacagatatcgagatgattggcattgaggacggcattgttgaattccatagaaataatgaaacaacaagctgtaaatatgattacgatggatacaaaatactcacctataaaagtggcaagaaaggcgttcgttacttattcgaatgtaaagatcctgaaagcaaagcccctaaatatatacaatttagcgatcatataattgcaccacgaaaaagttctcattttcacatttttatgggtaatgatagtcagcaatctttattaaatgaaatggaaaactggccaacgtattatccatatcagttgagtagcgaagaagtggtcgaggaaatgatgtctcattgagtattctcatgataacgcctcgatgccgctttagtaagttatcataactgccactggtccatccacaaacgccactgaacgcaagctagctacagacacgctcatcactatgacgtgtctgtatattaataagctaacccgcattgagttaaccaataacggattccatacacaatacggccaacagagaaagatacctgtgctcacgccattgcttatattggctggttacaatatgcactatcaattttttaaataacaaattattaaaaccacatctgtataaggaatttttaaggttcgtgggatagcttgactgtgaaaatcacaggagctacaaaaatgaaccgattcagtaaaactcaaatttatttacattggataacgctgcttttcgttgcaataacctatgccgcgatggaactccgtggctggtttcctaaaggtagtagtacttatctgctgatgcgagaaacacattacaatgcgggtatattcgtttgggtgttaatgtttagtcgcctgattataaaacaccgttatagtgatccttctattgtgccaccgccacctgcctggcaaatgaaagcggctagcctaatgcacatcatgctttatataaccttccttgcacttcctctgctggggattgctttgatggcttacagtggaaaaagctggagtttccttggtttcaatgtgtctccctttgttaccccaaacagcgaaattaaagcactgataaaaaatattcacgaaacctgggcaaatataggctactttttaatcgcagctcacgctggcgcagcactctttcatcactacattcagaaagataatactctgttacgaatgatgcctcgccgcaaataagtcgatccccttacaaggaaatgtgaaccatggacatcaacgcgtcataaatgtttacgcaagtgcacaatgcaccctttccactatcaacaaggaggagcagaaactgtgtaaatcgtacaatggtaagacttatcaaaaatacaggttaattttggtatttaaaccttttttacttgttagtatgatacaaaggctttcaaaaaagctgcgaaattcaacaactcttggaaattatggactttgtcccgcggctttaatctgacggccgcgttccttttttgactcaattattgaacccttctctacgcaacttcagttcccaccaccaactttgcggcagtttcataggatgaatgtctaaaagaataatggtgagcgataagaaaacgactgaataactgcacattttcgctcgaaagcttcctgtcagatccatagcgaatcaagtgctgaatgtcacagtatcgaacagaaaacagtgacgatctaacccttcaagaatattctacgattgttctgtttaggaaaagaaaggcgggaagtcgggagataagtcattgataaaggttcagatggttgccatgatgccaggaaatttggcattttaacagtccctgtccgtgcaattttgttcaagtgacgagtttgcgagcaaaacgatgattaagtggccctggaaagtacaagaaagtgcacatcaaactgcccttccctggcaggaagcactaagcatcccccttttaacgtgtctgacggaacaggaacaaagcaaattagtcactcttgccgaacgttttttacagcaaaagcggcttgttcctttacagggctttgaactggatagtttaagaagctgccggatagcacttctattttgcctacccgttctggagttaggactggaatggctggatggttttcatgaagtcttaatttatcctgcgccatttgtggtcgatgatgaatgggaagacgatatcggtctggtgcataaccaacgtattgttcagagtggtcagagctggcagcaagggcctatcgttttgaactggttggatatacaagattcttttgatgcttctggttttaacctgattattcatgaagtcgctcataagctggacacccgtaacggcgatcgcgccagcggagttccctttattccgttgcgtgaggttgctggctgggaacacgatcttcatgctgcaatgaacaacattcaggaagaaatcgaattggttggcgagaatgcggcgagcattgatgcttatgcagccagcgatcctgctgaatgttttgccgtactttctgaatatttctttagcgccccagaactttttgctcctcgtttccctagtttgtggcaacgtttctgccaattttatcaacaagatcctttgcagagactgcatcacgctaatgatacagacagctttagcgcgacgaatgttcattaattaacaactttgcagattaattaaccaattgaaatgacttatgaaatttagtgttgacagacaaggtaccgctaagtaatattcgccccgttcacacgattcctctgtagttcagtcggtagaacggcggactgttaatccgtatgtcactggttcgagtccagtcagaggagccaaattctaaaaattcgcttttttagcgcaatgtcactgaccttagttgaacattgttttttaacggatagcgggttttaacatcttaagcgccctcgacctttatggttgagggcgttttgctatgaacgccatcaccattttcccctcgattataaaacttgagttattcagtagtctcccctcttgcaactcacacccaaaactgcctaacgaaaagttattaattttcaatcatattgctatcagtatttacattttttcgctgtgctagaaagggcgcatttatgttagctcgtagtgggaaggtaagcatggctacgaagaagagaagtggagaagaaataaatgaccgacaaatattatgcgggatgggaattaaactacgccgcttaactgcgggtatctgtctgataactcaacttgcgttccctatggctgcggcagcacaaggtgtggtaaacgccgcaacccaacaaccagttcctgcacaaattgccattgcaaatgccaatacggtgccctacacccttggagcgttggaaagcgcccaaagcgttgccgaacgtttcggtattagcgtggctgagttacgcaaactcaaccagtttcgtacgtttgctcgaggttttgataatgtccgccagggtgatgaactggatgtcccggcacaagttagtgaaaaaaaattaaccccgccgccgggtaatagcagtgacaacctcgagcaacagatagccagtactagtcagcaaatcgggtctctgctcgccgaagatatgaacagcgagcaagcggcaaatatggcgcgtggatgggcctcttctcaggctagtggcgcaatgacagactggttaagccgcttcggtaccgcaagaatcacgctgggcgtggatgaagattttagcctgaagaactcccagttcgattttctccatccgtggtatgaaacgcctgataatctctttttcagtcagcatactctccatcgtactgacgagcgtacgcagattaacaacggcttaggttggcgtcatttcactcccacatggatgagcggcatcaacttctttttcgaccacgatcttagccgttaccactcccgcgccggcattggcgcggagtactggcgcgactatctaaaattaagcagtaacggctatttgcgactgaccaactggcgcagcgcacctgaactggacaacgattatgaagcacgcccggccaatggctgggatgtacgcgcagaaagctggctacccgcctggccgcaccttggcggtaaactggtctatgaacagtattatggcgatgaagtggccctgttcgataaagacgatcggcaaagtaatcctcatgccataaccgctggacttaactatacccccttcccgctgatgaccttcagcgcggagcaacgccagggtaaacagggcgaaaatgacacccgttttgccgtcgattttacctggcaacctggcagcgcaatgcagaaacagcttgacccgaatgaagtcgctgcacggcgtagccttgcaggcagccgttatgatctggtggatcgcaacaacaatatcgttctggaatatcgcaaaaaagaactggttcgcctgaccctgacagaccccgtgacagggaagagtggagaagtgaaaagtctggttagcagcctacaaaccaaatatgccctgaaaggctataacgtcgaagccaccgcactggaagctgccggtggcaaagtggtcacaacgggtaaagatattctggttaccctgccggcttaccggttcaccagtacgccagaaaccgataacacctggccgattgaagtcaccgccgaagatgtcaaaggcaatttgagcaatcgtgaacagagcatggtggtcgttcaggcacctacgctaagccagaaagattccagcgtaagcttaagtacccaaacattgaacgcggattcccatagtaccgccacactgacttttattgcgcatgatgcagcaggtaatcctgttgtcgggctggtgctcagcacgcgtcacgaaggtgttcaggacatcaccctttctgactggaaagataatggtgacggaagctatacccagatcctgaccacaggagcgatgtctggcacgctgacgctgatgccacagctgaatggtgtggatgcggctaaagcccccgccgtggtgaatatcatttctgttagcagttcccgaactcacagcagtattaagattgataaggaccgttatctctccggcaatcctatcgaggtgacggtagaactgagagatgaaaatgacaaacctgttaaggaacaaaaacagcaactgaataacgcagtcagcatcgacaacgtgaaaccaggagtcactacagactggaaagaaaccgcagatggcgtctataaggcgacctataccgcctataccaaaggcagtggacttactgcgaagctattaatgcaaaactggaatgaagatttgcataccgctggatttatcatcgacgccaacccgcagagtgcgaaaattgcgacattatctgccagcaataatggtgtgctcgccaatgagaatgcagcaaacaccgtcagcgtcaatgtcgctgatgaaggaagcaacccaatcaatgatcataccgtcacgtttgcggtattaagcggaagcgcaacttccttcaacaatcaaaacaccgcaaaaacggatgttaatggtctggcgacttttgatctgaaaagtagtaagcaggaagacaacacggttgaagtcacccttgaaaatggcgtgaaacaaacgttaatcgtcagttttgtcggcgacagcagtactgcgcaggttgatctgcagaagagcaaaaatgaagtggttgctgacggcaatgacagcgtcacaatgaccgcgaccgtccgggatgcaaaaggcaacctgctcaatgacgtcatggtcactttcaatgttaatagtgcagaggcgaaactgagccaaaccgaagtgaatagccacgacgggatcgccacagctacgctgaccagtttgaaaaatggtgattatagggttacggcctctgtgagctctggttcccaggctaatcaacaggtgaattttatcggtgatcaaagtactgctgccctgaccctcagtgtgcctagtggtggtatcaccgtcaccaacacagctccgcaatatatgactgcaaccttgcaggataaaaatggcaacccactaaaagataaagaaatcaccttctctgtgccaaacgacgtcgcaagtaagttcagcattagcaacggaggaaaaggcatgacggatagtaacggggttgcaatcgcctccctgaccggcacgttagcgggcacgcatatgatcatggctcgtctggctaacagcaatgtcagcgatgcacagccaatgacgtttgtggcggataaagacagagcggttgtcgttttgcaaacaagcaaagcggaaatcattgggaatggcgtggatgagacaactctgacagcaacagtgaaagatccgagcaatcatccggtggcggggataacggtaaacttcaccatgccacaggacgttgcggcaaactttacccttgaaaataacggtattgccatcactcaggccaatggggaagcgcatgtcacgctgaaaggtaaaaaagcgggcacgcatacggttaccgcaacgctgggtaataacaataccagtgatagccagccggtaacatttgtggcggacaaagccagcgctcaggttgtcctgcagataagtaaagatgagatcacaggtaatggcgtcgatagcgcaacgctaactgcaacggttaaagatcagttcgacaatgaggtgaataatcttccggtaacattcagcagtgcctctagtggactcaccctgaccccgggagtaagtaataccaacgagtctggcatcgcgcaggccactctcgcaggcgttgcctttggtgagaagacggttactgcaagtctggctaataatggtgccagcgacaacaaaactgtgcattttattggcgacacagcggcggcaaaaattatcgagttggcgcctgtcccagacagcataatcgccggtaccccgcagaacagctccggcagcgtcatcaccgccacagtcgttgataataatggctttccggtgaaaggtgtgactgtgaacttcaccagcaacgcagcgacagccgaaatgacgaacggcggtcaagccgtgacgaacgaacagggtaaggctaccgtcacttataccaatacccgctccagcatagaaagtggagcgagaccggataccgttgaggccagtctggaaaatggtagctccacgcttagcacaagtattaatgtcaacgctgatgcgtctacggcacatctcaccttgctacaggcactttttgatacagtctccgcaggcgagacaaccagtctgtatattgaggtgaaggataattacggcaacggtgtcccccagcaggaggtaaccctcagcgttagtccaagtgaaggcgtgacccccagtaataacgctatatatactaccaaccacgacggcaatttttacgcaagctttaccgctacaaaagccggggtttatcaattgacggcaaccctcgaaaatggcgatagcatgcaacaaacagtgacctatgtgccgaacgtcgcgaatgctgaaatcacgctggcagccagcaaggatccggtgattgccgacaataacgatctcacgacactaacagcaacagtcgctgatacagagggcaatgcgatagccaacactgaggtaacatttactctgccggaagatgtgaaggcgaacttcacgctgagcgatggcggtaaagtgattactgatgctgaaggcaaagcgaaagtcacgctgaaaggtacaaaagcaggcgctcatactgttacagcaagcatgactggcggtaagagtgagcagttggtggtgaactttattgcggatacgctcactgcgcaggttaatcttaacgttaccgaggacaattttatcgctaataacgtcgggatgaccaggctgcaggcaacagtgactgatggaaacggcaacccgttagccaatgaggcggtgacattcacgctaccggcagatgtgagcgcaagctttactctcggacaaggcggttccgccattactgatatcaacggcaaggctgaagttacactgagcggtacaaaatccggcacctaccccgtgacagttagcgtgaacaattatggtgtcagtgatacgaaacaggtgactttgattgccgatgctggtaccgcaaaactagcctccttaacctctgtatacagtttcgtcgtcagcacgaccgagggcgcaaccatgacggcaagcgtcactgacgctaacggcaacccggtagaaggcataaaagttaatttccgcggaacctccgtcacgctaagcagcaccagcgttgaaacggatgatcggggtttcgctgaaattcttgtgacaagcaccgaggtcggactgaaaacagttagtgcctctctggcagataaacctactgaagtcatcagccgattactgaatgccagtgcagatgttaattctgcgacgattaccagtctggagataccggaaggtcaggtaatggtcgcacaagacgtagcagttaaagctcacgttaacgaccagtttggcaacccggttgcgcatcaacccgtgacattcagtgcagagccatccagccaaatgatcatcagccagaatacggtctctactaatacgcagggtgtagccgaggtcaccatgacgcccgaaagaaacggtagctatatggtgaaagcatccctgccgaatggagccagtcttgagaaacaactggaggctattgatgaaaaactgacactcacggcgtccagtccgcttatcggtgtctatgcccctacaggcgctactctgacggcaacgctaacctctgcaaatggcactccagtggagggtcaggtcatcaactttagcgtaacgccagaaggggcgacgttaagtggcggaaaagtgagaactaactctagtggtcaggctccagtcgttttgaccagcaataaagtcggtacatatacggtgactgcatctttccataacggcgtaacaatacagacacagacaaccgtgaaagtcactggcaacagtagcaccgcccatgttgctagctttatcgctgatccaagcactatcgccgccaccaacactgatttaagtaccttaaaggcaacggttgaggatggcagtggtaacctgatcgaaggtctcactgtgtacttcgccttaaaaagcggctctgccacattaacgagtttaacagcggtgaccgatcaaaacggaatcgcgacaacaagcgtgaaaggagcgatgacaggtagcgtcacggtaagcgcagtcacgaccgctggtggaatgcaaacagtagatataacgctggtggctggcccggcagacaccagccagtccgtccttaagagcaatcggagtagtctgaaaggggactataccgatagtgctgaattacgtcttgttctgcacgatataagtggcaatccgatcaaagtttctgaagggatggaatttgtgcaaagtggtactaacgtgccctatataaaaattagcgcaattgattacagtctaaatatcaacggtgattacaaagccactgttacaggaggcggagagggtatcgcaacgctgatccctgtattgaatggtgttcatcaagctggtctgagtaccacaatacaattcactcgcgcagaagacaaaataatgagcggtacagtaagtgtcaatggtactgacctaccgacaactacattccctagccaggggttcaccggggcgtattatcagttgaataatgacaactttgccccaggaaaaacggcggctgattatgagtttagtagctctgcctcctgggtcgatgttgatgctaccggtaaagtgacatttaaaaatgtcggcagcaatagcgaaaggattacggcgacgccaaaaagtggaggccctagctatgtatacgaaatccgtgtgaagagttggtgggtgaacgccggcgaggctttcatgatatacagccttgctgaaaatttttgcagcagcaatggctacacgctccccagagcaaactatttaaaccactgtagttcccgaggcatcgggagtctgtacagtgaatggggagatatggggcattacacgactgacgctggttttcaaagtaatatgtattggagttctagtcccgcaaacagtagcgaacaatacgtagtttccctggcaacaggtgatcaaagcgtatttgaaaagcttgggtttgcttatgcgacatgttataaaaacctgtgattttccgttataatttcttaaagagtgttccattcggggcactcttttttacattccctctacagaactagcccttctctcacagaaaatgaataaataaaaatgcggcaccgccagaatcgcgttcgatgtgactatgatcattttcggtgagtactgctttgatctaaaggctggttttctgtgatgattgaccagcctcagagtattgatgacaccaccgttcataacagatcggcattactatgcataagtactgtctcatattctcgccaaaacactttttaatgcctttgcgaattcatccagacttatattgtcaattttttgcccaacgacgactgactccgagacatcggccattgcgggccatcgcgttttgtaatcagcataaattgcaacaacaggggtattataggcacttgccatatgtaatattgaggtgtcaggagttattgcgatataagcatcttttatgattgctgctgaacgtttaatcgagggtggtaaggataaacggtagacattattataacaatccactaatgccctggctttatcttcacctttgggtccatgaacgatcactattggtatatctgtttcactttaaatttttgctattagattttctgcaatcgataatgaaaatgtacgttcctgcgagctaccttctaaattgaacgcaatgtaagatcctaacgatcgcatttcctcgcgcacctcatcgagtacatcctcacttagtggcaattcatatattggcctgactgctggaaaacccgcctcacgcatcataaatgcccatgtcataggtacgggagcccggagtttctgatccatactggacgcgttcttgcacaaaggggagaagcaattcatggttataccaacaacctgaaaattcgtttttgctttcaactgactgataaataacatcgttttcaggttctttttacgcatcccctcaatgcaaagatccggcgtaccgtattgctgtgttatgttctttgctaaatcttttatttcttttaatgttgcgtgatcctgcatagtcattgtgactaatgttaatttagtctgttcaagtttaagcgcattaaagacttctaaattaattgtcgacgttacaattaaaagatgcttaattttatgcaattcaagcgcccgaataacaggaaagatggccatagcatcgccaatctgatcgggaatatggatgacaacaaagtctgttttttcaatattgaaattataagctttataatcgtagtaactaaatgcaatacgtctcaacaatgatgctaaaaacatacctaacctcgcctccctactggttataatgcaatgcagtctatcagactcatcagggtgccattttgtgcatatgcggacttttatgtttcatatctctaacctgtgggtcctctgcttaatccttaaacaacaccagcaactcctgcgctttcatcttccatcgaatttttcatgttgccgctaatcagccataaaatcatttgcagatgcgctctgtcgaggtagtctcataaggttcgtttatagatcgacggcaatgtgagttaccttttccatactaattataaaaagacagtacaaacaggatcattatggactccacgctcatctccactcgtcccgatgaagggacgcttagcttaagtcgcgcccgacgagctgcgttaggcagcttcgctggtgccgtcgtcgactggtatgattttttactctatggcatcaccgccgcactggtgtttaatcgcgagtttttcccgcaagtaagcccggcgatgggaacgctcgccgcatttgctacctttggcgtcggatttcttttccgtccgctcggcggtgtcattttcggtcactttggcgaccgactgggacgtaagcgcatgttaatgctgaccgtctggatgatgggcatcgcgacagccttgattggtattcttcctagtttcagcaccattgggtggtgggcacctattttgctggtgacactgcgtgccattcagggatttgcagtcggcggcgaatggggaggcgcggcgttgctttccgttgaaagtgcaccgaaaaataaaaaagccttttacagtagcggtgtacaagttggctacggtgtaggtttactgcttagtaccggactggttagtttgatcagtatgatgacgactgacgaacagtttttaagctggggctggcgcattcctttcctgtttagcatcgtactggtactgggagcattgtgggtgcgcaatggcatggaggagtccgcggaatttgaacaacagcaacattatcaagctgccgcgaaaaaacgcatcccggttatcgaagcgctgttacgacatcccggtgctttcctgaagattattgcgctacgactgtgcgaattgctgacgatgtacatcgttactgcctttgcacttaattatagtacccagaatatggggctaccgcgcgaacttttccttaatattggtttgctggtaggtggattaagctgcctgacaattccctgttttgcctggcttgccgatcgttttggtcgccgtagggtttatatcacaggtacgttaatcggaacgttgagcgcatttcctttctttatggcgcttgaagcacaatctattttctggatagttttcttctccataatgctggcaaacattgcgcatgacatggtggtgtgtgtgcaacaaccgatgtttaccgaaatgtttggtgccagttatcgctatagtggcgctggagtcggttatcaggttgccagtgtggttggcggtggatttacaccttttattgccgctgcactcatcacttactttgccgggaactggcatagcgtcgccatttatttgctggctggatgcctgatttccgcaatgaccgctttgttgatgaaagacagtcaacgcgcttgatagcctggcgaagatcatccgatcttcgccttacacttttgtttcacatttctgtgacatactatcggatgtgcggtaattgtatggaacaggagacacacatgaataataagggctccggtctgaccccagctcaggcactggataaactcgacgcgctgtatgagcaatctgtagtcgcattacgcaacgccattggcaactatattacaagtggcgaattacctgatgaaaacgcccgcaaacaaggtctttttgtctatccaagtctgaccgtaacctgggacggtagcacaaccaatccccccaaaacgcgcgcatttggtcgctttacccacgcaggcagctacaccaccacgattactcgccctactctctttcgtagctatcttaatgaacaacttacgttgctgtatcaggattatggtgcgcatatcagtgtgcaacccagccagcatgaaatcccttatccttatgtcatcgatggctctgaattgacacttgatcgcagtatgagcgctgggttaactcgctacttcccgacaacagaactggcgcaaattggcgatgaaactgcagacggcatttatcatccaactgaattctccccgctaagccattttgatgcgcgccgcgtcgatttttccctcgcacggttgcgccattataccggtacgccagttgaacattttcagccgttcgtcttgtttaccaactacacacgttatgtggatgaattcgttcgttggggatgcagccagatcctcgatcctgatagtccctacattgccctttcttgtgctggcgggaactggatcaccgccgaaaccgaagcgccagaagaagccatttccgaccttgcatggaaaaaacatcagatgccagcatggcatttaattaccgccgatggtcagggtattactctggtgaatattggcgtgggaccgagtaatgctaaaaccatctgcgatcatctggcagtgctacgcccggatgtctggttgatgattggtcactgtggcggattacgtgaaagtcaggccattggcgattatgtacttgcacacgcttatttacgcgatgaccacgttcttgatgcggttctgccgcccgatattcctattccgagcattgctgaagtgcaacgtgcgctttatgacgccaccaagctggtgagcggcaggcccggtgaggaagtcaaacagcggctacgtactggtactgtggtaaccacagatgacaggaactgggaattacgttacagtgcttctgcacttcgttttaacttaagccgggccgtagcaattgatatggaaagtgcaaccattgccgcgcaaggatatcgtttccgcgtgccatacgggacactactgtgtgttagtgataaaccgttgcatggcgagattaaacttcccggccaggctaaccgtttttatgaaggcgctatttccgaacatctgcaaattggcattcgggcgatcgatttgctgcgcgcagaaggcgaccgactgcatagccgtaaattacgaacctttaatgagccgccgttccgataataagttctgaaccttcttatcagaaatagatgtgaaggagtaagtaagacacctggcaaatagcctgcaataatcgtgggctgtttgcttccttgggcggatacgagttttattatcgtcttaatgatttccacatattaaaagcaagtatgctttcaaaacacaattataaaaaatcccgccaacaatataagtttttataaaattaaatataagattatggctttagaatatttttatttctaatagacgagatttttcctgttatgatataatatgctgaattaacacatgttaacgatttaccagtaatgtaaataaattttcgaggagatcattccagtgggacgtaaatgggccaatattgttgctaaaaaaacggctaaagacggtgcaacgtctaaaatttatgcaaaattcggtgtagaaatctatgctgctgctaaacaaggtgaacccgatccagaattaaacacatctttaaaattcgttattgaacgtgcaaagcaggcacaagttccaaagcacgttattgataaagcaattgataaagccaaaggcggcggagatgaaacgttcgtgcagggacgttatgaaggctttggtcctaatggcagtatgattatcgccgagacattgactagtaatgttaaccgtacgattgctaacgttcgcacaattttcaataaaaaaggcggcaatatcggagcggcaggttctgtcagctatatgtttgacaatacgggtgtgattgtatttaaagggacagaccctgaccatatttttgaaattttacttgaagctgaagttgatgttcgtgatgtgactgaagaagaaggtaacattgttatttatactgaacctactgaccttcataaaggaatcgcggctctaaaagcagctggaatcactgagttcagtacaacagaattagaaatgattgctcaatctgaagttgagctttccccagaagatttagaaatctttgaagggcttgttgatgcccttgaagatgacgacgatgtacaaaaagtttatcataacgtcgcaaatctctaattatcttttaaagaaatctgtctttacggcagatttctttaatctcatataattcttataaaaaatataatattcaactcgtcatattgattatacccccccgttcccagagaaataatatttattaaaattccagttcttctttttctgattacagaaggcaaagtggcaattacgcatagtttcccgataaagacgcgatagcgacatcccgcataaggcatttttctctttatctttgtacggtacttcatggaacagagtttttgaccttgcgaatcgtgatgtctgttggggagggacaatttgctcactgaagcgtgagactcgattaagcgcacgaaacacagaaatcaaaaaacccggtcacttttttacaaggtaaccgggtaaaaataatttttattttttaactgttttgagactcatagagatgtctcaaaactaaaatttggctcctctgactggactcgaaccagtgacatacggattaacagtccgccgttctaccgactgaactacagaggaatcgtgagaacgaggcgaatattagcgatgcccacccacaatgtcaaagcctgttttttaaatttgaaatcgtttgctgaaataatctgcattttgtcgtttattcgctcacaactggctttttttcacacttttgcggctcgggtcgagggtatttccatagccaacgtccagtaaccattcgccagtaaaacagcacggcccgcacagcccagtcggcaaacattcccatccagacaccaaccacaccccagccaagcatgattcccagcacataaccgactacaacccgacaaccccacatgctcaacatgctaacccacatggcgtaacgggcatcacgagcacctttaaatccagcgggtagcacccaactggcggaccaaataggcataaataaagcatttagccaaatcagaatcacaacgacatgtttaacctgtggatcctgggtgtaaaagcttgccataaccccggcaaagggagccgttagccaggcgatggccgttaatccaagagtggaaagccagaacacatgccgcaactgaatctctgcttgcgctatctgccctacccccaaccttcggcctgtaatgatcgtagaagcagagccgagcgcacttccgggtaagttgataagagccgcaatactaaacgcgataaaatttccggcaataacactggtccccatcccggcaacgaacatttgggttaataaccgaccactggtaaataacacactttcgacactcgcgggaataccaatccccatgacttcccagataatgctaaaattcagcggtttaaaatagctctttaagctaatccttagcgcaggattaaaaccaatcgccagcacccacaaaattgcaactgcgccaatataacgagaaatggttaaacccagccctgccccgacaaatcccagtcccggccaggagaaaaggccgtaaatcaatatgccgctaataataatattaagaatattcaggctaccgttaatcaatagcggtattttcgtattccctgcaccacgaagtgccccgctaccaataagagtgatggcagctgctggataactgagtaccgtcagctccagataagtcaacgccagtgctttaacttctgtcgtggcatcacccgcgacgaaatcaataatttgttcgccaaaatgatgaataagcgttgccaacagtacggcaaacaacgtcatgatcaccaaactctgccgcgtcgccaccctcgctcgtcgtcgatcccgcttaccgagactaaatgccacaacgacagtagtaccaagatcgatagcagcaaaaaaagccataatgaccatattgaagctgtccgccaatcccacgccggccatcgcatcttttcccagccagctgaccagaaaagtgctcagaacccccatcaacaggacacaggcattctccatgaagataggaacagcaagcggggttatctcgcgccagaacaacactttgtagctcttgcgtttagcgtgccagcgagtgccgtgaacaacctggcgtaaagcagaggagatattcaaagcgctccttaattgcagaaagtgaaaccacatttcaaataaactgggagaatcagcaaagctgcaaagattttcgccaacaaattgtctgcaaatgcaacaaactgtacttagaaacggcaaacagttggggaatttaaaaatcgggttactcaaaagatttttcgccgttaagatgtgcctcaacaacgattcctctgtagttcagtcggtagaacggcggactgttaatccgtatgtcactggttcgagtccagtcagaggagccaaattcctgaaaagcccgcttttatagcgggatttttgttatatctgataatcaatttcctcttcactgctttccatcacctgccgcttgatatcctcaacactcagtcctgcattacaaagttccagaaagcgccagacatagttacgctgaagttgtcctcgcttcagtcccaaccagacagtattagcatcaaaaagatgccgcgtatccaggcggattaaattctcttcctcttgttcgccactggattgctcggcaactaatccgatcccaagcccaagagcaacataggttttaatgacatcagaatcctgcgcacttaatacaatatctgccagcaaacctttgcgggcaaatgcgtcatcaatacgactgcgccccgtaatcccctgtcggtaagtgattaacggccacttcgctatactttccagcgtcaatggactaatttgcgtcaagggatgatcgtgtggaacaagcaaactatggtgccaacgaaaccacgggaaggcgacgagctgcgggtcattactcaaacgctcgctggcgataccaatatcagcttcgccattttgcaacaatgtcgcaatttcctgtggcgtcccctggattagctcgagccgaacctccgggaaaagttcgcgaaaagctttaatgacctctggcaagctataacgtgcctgagtatgcgtcgttgcaatagtgagaacgccagacgtatcgttggtaaacaggtctgcaagccgacgaacattactggcttcattcagaatacgttctgcaatgaccagtaatgctttgcccggttcagtcatgcccagcagtcgcttacctcgtcgaacaaatatttcgatgccaagttcatcctccagttcccgaatatgacggctgacgccactctgactggtaaaaagcatattcgcaacctctgtcaggttgtaatcctgacgtgcagcctcgcggattatctttagttgttggaaattcacggtaaactccgggcagttcagatttcccgttattgttaaagtctaatgcccggcataacaaataataaaaacccgcatcttattccatcccgatataacacttagctcaccaattgccactgccttttttccatcactggagaactaatcacactcattaacaactctttcactgcctgtgcctgtgggcttaagttcgctctggcgggtaaatttaaactcaaagagagactcatggaaggagtggtaatgcgactcatccacccatttactgcgccacataagctacgcgcggcgctttcgggtaatactgcaacgcccatgccgctggcaatcgctgcggtaagcgtggcaatagactcaatttcaccaataacttttgccgtgagtcgccgtagggaaaaagcctcatcaacacgaagtctaatagcactgtaatcactggggagaaagaggttcatttgcgcaatagcattcacatcaacgctttgccccgggcaatcttgagttcctaccagaaaaagatcttctttcagcaaagcctgactggatacaccagccacaggggaatgctcataaatcaccgccatatcgagttggtgatttatcaatttttcgttaagcactgcaccactattttcatgaagatagataacgatctccggaaattcagcgcgaaccgcctgtaataagggcatggtgatggaactcgcagcggttcctggtgcaaagccaatgctgacttgcccgcttaatgcctgaccaacgttatgcaccgccagttgggcctgttcacactgacgtaaaatggcccgcgcatgggtatagagaatttttccggcgtctgttggtgtaacgccccgctttgtacggatcaaaagttgttgatttaactcaccttccagtgtggcaacctgctggctgagcgctggttgtgcgatatgcaatacttcagcagcctgggtcaggctaccaatatctacaatttttacgaagtatttcaggcgtctgaagttcatgttgcctccggtttttaagaatcggcccaagtgccgccattacttacaaccagattgcaagatgcttgccagttttattttggtgttgatgtacaagctaaccaactgtcaaataagagattatgatagattcgtcatttgctcctttaatcagctgtcgcgttcccctgccctataaaaggagggtatgcaccacgatggttcattacccaataagattgaaagctcaccactttgttgaaattgacagcaaacaaacaaaaaaatgcatttcaccctttgacatcaccatgcactgccattaatatgcgccccgttcacacgattcctctgtagttcagtcggtagaacggcggactgttaatccgtatgtcactggttcgagtccagtcagaggagccaaattcaaaaaagcctgctttctagcaggctttttgctttctaattaccaacgctcttaaaacatctgtctactaccagaactaatttgcacaggcattccgcttcgacgttgcaacgcagcatttgcgcgatttacatcaacttcttgcccgttgataaacgcccgcaaagatggggttaccggcaatggcacttttcggtcagactcatattctgcacgattgcggctcaatggctcatgaacttccagccagttgctgccatctggttcagtggtgtattttactggctggtcgataatttgcacacgcgtcccaacaggaacattatcaaacagatatttgatatcgtcattgcgcagacgaatacagccctgacttacccggagcccaataccaaaattggcattggtaccatggatggcatacaacctgccaatataaatcgcgtacagccccatgggattatcggggcccgcaggaacaaatgcgggcaaactctcccctcgtttcgcatattcgcgccgagtgttcggcgttggcgtccaggttggagcttcttgtttacgttcaacggtagtcacccagttacgcggggtttctcgcccagcctggccgataccaataggaaagacttccacagtattactgtctggtgggtagtaataaagacgcatctcagcgacgttaacaacaatccctttacgaacagtgtcgggcaaaatcagttgctgcggaatggtgagttggctgccagacttcggcaaaaaaacatcagcgcccgggttcgcttccagcatgttacttaacccttgcccgtattgtgcggcaaaagtctccagcggctgggtattgtgatcaggaacagttacagtaaagctctgccccactaaacggctaccctctggaggtaatggataagttaccgccaggctagtatggctggcaaaaagcagagcaaaactgcaaagaatatttacacgacgcatcatgtccctttcctatgtcgcgaaagctatccgttaagtatagcttttatcagacttttcgtttttaactgttcaaatcagaagtcgtattccccggtagaacaatattactggcagcaagttcgcccatgttgttgtatatcgcacaggcagcttcgatgatgggcatcgccagagctgcgccactcccctcacctaaacgcatctccatattgagataaggctccagccccaaatggctgagcgctatacgcgcgcctttttctgcgctcaggtgagaaggaatgagatacggtttgatcgcaggagacatctggcaggctgcgagcgcagcagcataagaaagaaatccatccagcaacacgggtaaaccgcaggaagcagcacctaacatcactccagctattccgaccaaatcaaatccacccacttttgccaggacatcaacaccatcctgaggatttggttgattcaacgtaatcgcccgacgcacaacatcaattttattagccagtttatctgtcggcaggtttgcgccaatcccaaccacttcttcaggatcccggccagtgattgtgctgactattgctgctgccggtgtcgtgtttgccatccccagttcacctacaccaaacagcgtgacaccgttttttgccagctcctgcgtataacatatgacgtccaaaagcaacttttcagcctgacggcgactcattgccggagcactagcaatattgccgctacctcgtgcgacacgcatgttgataagcccggggataggctcagcagtatcaataccaacatcaattacgtggacgttagcgcccgcttgttctgccagcacacacacgccggttgttccacgggtcatattttcagcctgtatggctgtcacttcttttggagaaatagcgaccccttcctcccagacgccgtgatcggcacacataaccagtaccgcttttttgcccacatgcggtatgccattcaaccccggcattcctgccagttgtatggcaagcacctccagctttcccaggctaccaacaggtttgagtaacccgtcaatatgccgttgtgcacggctcatagcggtagaatcgatggctgggatcgtattcagtaaatcggcaagtatttgcatctcacgtctctttatagcagtgccagcaggaagaccagttcaccaagctctatggctgctcccagcgtatcgcccgtttgcccgcccagcgtacgtttgagaagctgaccgaggatgaaaatcgccaccatcgtcaccaccatagcagccacaccatgcatacccggcaataatacggcagcaaaaatagcggctaagccgagtgtgacgcaggtttgtcgcccatcaattttgccaatgaacacattgccaagcccttcttcccgcgcataacgatgacgatacatcaataatgcggcagtcccgcggctgaccgcacatgctgccgccaggcttgcaaggatgctttcgccacgcagagccaactcgcttaacaccagaatctttgccagtaccacaaaaatcaatgccagaccgccgtgggtgcctaaacggctatcacgcatgatttccaacatgcgatcgcggctacgtgcagaaaatacgccatcacaggtatcagcgaggccgtccagatggaatcccccggtcatcagcaccagcacaagtacgctaaacagtgccgccagtggtgcgccacaccatgcctgcagcaccatgaagaccagcccgctaatcgcgccaagcaataatccaatcaaaggaaaagtaataataccgcgagaataatgctcgaaatccagtccctgggaccagcgacgcggtacaggcagacgcgtaataaaactgagcatcgcccaaaataatttactcatttgatttttactccaataccgctaaccaccagccatacttcatttgccgcagcggccaactgctgatttacccgcccggcaatatcacgaaaatgtcgtgccagacgactctccggcacaatccccattcccacttcgttagtcactaatacaacctttgcggggcaacgttggcaggcagcaatcaagctctgaatctcagcattaatcgcctgttccatcgcctgataatcccattcatcagggtctttatcgccgccataatcaaacaacagattagtcaccattgtggtaacgcattcaagcaacacaacctcattcgggttaatgtctgcatgaattaattcatcaagatgttgccagcgctccactgtgcgccagtgctccgggcggccttgccgatgatgttctatccgtgcagccatctcatcatcaaggatttggctggtagcgatatacagaacctgactagagtccccaataagcgcctctgcgtggcgactcttcccgctccgtgcgccccccgtcaccaaaatcatcataccgactcctgattcaaatgtatgatggtattcattgaacagaacaatggatcccccaccgttgctgaccgcaaaacatttacgcgattaatactgcgcgtaatataattaaaaatccagcattctcaatccattacgaaataagatggcattacggaatagccagactttctcgtgttaacgtccgacaaaatgcgtcattgacagcggtttctgtggattgacacatttcattcagataatgaattaatgctactgccggaacaaccagcaaacgggcattgtgttctgaaatccaggctattgattcaacgtcagcgacagatctgcgctgtaaaagaacttgtaaaacaacgtaatagaattatccggaatggtggcgactatgcactagggaaggtgcgaataagtggggaaattcttctcggctgactcagtcatttcatttcttcatgtttgagccgattttttctcccgtaaatgccttgaatcagcctatttagaccgtttcttcgccatttaaggcgttatccccagtttgcagaaactccgtaatgagattaaaagcgctcataactcatctgtcggccagaaggcgcgcctctgaattatccgacggacaaaccgggaacagtgtaatttcccggcaggagcgaaaaaattgaaaggcgcatcttactcttttcgctttcaaaaaaaagagtggtcatcgcgttaacacaccgccctgagatgaattagtgatgttttggctgcaccgcaacatacatttcgatatcccagtacccatcttccgcgccattgttcaaataaacctcgaagcagggctttggtaacatttcataagcactgtcctgcaagagactattaaagaactgataccagggtttagcaaaatcatcaccgactacacgagctaccgccaccgcatactgaccacctgtaatttctgtcagaatgacgccctcactgttttcgggaagcgtaaagtaacccggcaccgtcacgacggtgtcgcagcgtaatttttcggcgggtgtttcatctggattgtcgtaatagacagcaacccactccttcggcacaatatttttgctatctacccacatcatcaactgctcaaagcctttctttaccgtctgttcccacgggccaacgagatggaaacctgcaacggtacgtttctcttcctgcttaatctcgtagttcatgacgcctccattgatactgtttttatatacagtatagttgcaaaattaaaaccacaaggaatgagtgttgattatgcgagcagactcgcactcctgccagtctgctgcaaaagaaaggtcaggccttatggtggaaataatcactcaggcgagaaaacatgctgccttccccgacagattccagggtaaccagcggccagtgcgccacctgtttatcacggtcgtaaagttcaatttcccctacccgctgatgggcgctaattggcgcggtgagttctttaccatcaagggtatatttggctttgatatgtggaatttcggctttcggtagcaccatccagaactcttgttccgttcccaggtcgatattttctttatcgccataccagatgcgttccgttccgacctttttcccacggtgcaaaatttgcaccgtagtaaagttttgttgcccccaacgcagtaattttcttgcctcttcctcacgaccttttgcactgtcagcccccattaccactgcaatgagacgacgctgcccatctacagcgctagcaatgagattaaacccggcaccagaagtatgacccgttttcaggccgtcaacattcatggttttatcccacaacaacccgttacggttttgctgggtgataccgttccaggtgagacttttctcactgtacatatgataaaactcgggctcgccgtggatgatagcacgagaaagcacagctaaatcataagcgctgctatgctggccaggtgcatccagaccatgcactgtttcaaaatgcgtatccttgagatgcagcttctcggcatagttgttcatcatttcaacaaactgccgttgcccaccggcaatatagtcagccagagcaacacaagcgtcatttccggaatccacaattaaaccacggcttaaatcacgtacgcttacgcgatcgccctctttcaaaaacatcagactagaaccgacaaacaccggattatctttcgcccacgcatcgcgccccacggtgacaatatcgtctggcgtaatgcgatgactatcgatagcgcgatccacgacataacccgtcatcagctttgtcaggctggcgggattgcgctgttgatgctcattacccgcggtgaggatctgaccggtggtgtaatccatcaatacccaggacccggcatgaatctctggaggctgaggactaaaaggaatgttttccgccgcaaaaccagagcttaagttaaaaacgaacaaagaagcagcaataataagacggcgtttcaacagcaaaccctcaggagtttcaaatagctgttctttttacggaaatacttatgaactggctggaataaagtgcaagaaaatgtgactaccctctcatttttatctgacatgatctgttgccactcgctgccaaattgtggcgctaaagctgattagcacggtgatatttgatactctggcagacagcagaaataacggatttaacctaatgatgaatgacggtaagcaacaatctacctttttgtttcacgattacgaaacctttggcacgcaccccgcgttagatcgccctgcacagttcgcagccattcgcaccgatagcgaattcaatgtcatcggcgaacccgaagtcttttactgcaagcccgctgatgactatttaccccagccaggagccgtattaattaccggtattaccccgcaggaagcacgggcgaaaggagaaaacgaagccgcgtttgccgcccgtattcacagcctttttaccgtaccgaagacctgtattctgggctacaacaatgtgcgtttcgacgacgaagtcacacgcaacattttttatcgtaatttctacgatccttacgcctggagctggcagcatgataacagccgctgggatttactggatgttatgcgtgcctgttatgccctgcgcccggaaggaataaactggcctgaaaatgatgacggtctaccgagctttcgccttgagcatttaaccaaagcgaatggtattgaacatagcaacgcccacgatgcgatggctgatgtgtacgccactattgcgatggcaaagctggtaaaaacgcgtcagccacgcctgtttgattatctctttacccatcgtaataaacacaaactgatggcgttgattgatgttccgcagatgaaacccctggtgcacgtttccggaatgtttggagcatggcgcggcaataccagctgggtggcaccgctggcgtggcatcctgaaaatcgcaatgccgtaattatggtggatttggcaggagacattagcccattactggaactggatagcgacacattgcgcgagcgtttatataccgcaaaaaccgatcttggcgataacgccgccgttccggttaagctggtgcatatcaataaatgtccggtgctggcccaggcgaatacgctacgcccggaagatgccgaccgactgggaattaatcgtcagcattgcctcgataacctgaaaattctgcgtgaaaatccgcaagtgcgcgaaaaagtggtggcgatattcgcggaagccgaaccgtttacgcctagtgataacgtggatgcacagctttataacggctttttcagtgacgcagatcgtgcagcaatgaaaattgtgctggaaaccgagccgcgtaatttaccggcactggatatcacttttgttgataaacggattgaaaagctgttgttcaattatcgggcacgcaacttcccggggacgctggattatgccgagcagcaacgctggctggagcaccgtcgccaggtcttcacgccagagtttttgcagggttatgctgatgaattgcagatgctggtacaacaatatgccgatgacaaagagaaagtggcgctgttaaaagcactttggcagtacgcggaagagattgtctaatttgaagcctccgccgctggtacggcggaggacaatgttgagtcaggctttttgaacggtgatgctccacgctgcatcgccaatctgctgataatcggtgatggcatgtccttcttctgccgcccactgtgggattgcttcagttgcctgggtgcaatcaaactcaatcactaactcatcgccgctgaccatttctgccagagctgcttttgcttctatgagtggaaacggacagacctgcgtcaccacatccagctttttaatcaccatctttacaccttacttaatttgccgcagcagttgccagtcgcgccttacgctgcggtcgaacatacacaagccaggacgcagtccagactccgagaatcataaatacaaggccaatccagccctgccaggtcatcattgcagtcataaccagtccattaccgatagagcaaccacctgcaatactggcaccgaagcccatcagtacaccacctaacccgctacgtaatgttgtttgtgcatcagctgcgcgaacgcggaactcacggctcgctttggctgcaataaaactccccacgaagatccctaacaccaggaaaacgccccagttaatgtatttcatgtcacccgcgaccagaaattgcagaatattggccgttggggaagtgattcctaacccaaacatgcgtccggttgcttcactcaggggccaggctaaaagcgcaatcaaaccgatgagtacagctgtgacaaagggatgccagcgtttttcaaacagaatatgagcgatcccggttcggcgcggcggtaaggtcgcgactttgagttttggcttcttcaactctttcatcaccacccagagcgttatcaccagcaaaacggcaaccaacggccacacagacaaattaaaagtctcagcaatagagttatgttcagtactgtagtgctgcaaggtttgatttaaaccactggcatgtggagaacgcatcaccgcactcatcaccatataagtgaaaagcgcgatccaactgccgatcaatccctcacccgcgcgataccaggtcccggtggcacatccacccgccagaacaattcccagcccgaagatatacccacctataacagtaccaagccacgggaacgccccggcttcgtaagtcagtaggcccgcctgaattaacgcaaaaacccccacgctttgtacgctaattgcaatcagcaaggcgtaaaacatgcgattatttttcacgatatacatatcgcgaaaaccacctgtcaggcaaaaacgcccacgctgcatgacaaatcccagcagagcaccacaaattagcccgcttaatatcatactaaacataaattaattaaccagatgaatgttaatgaggaaattattcatgactggtggaatgcagaccaataaccaaattctctaaattagaacaaatggttattaatgaggagttcgatacaaaagaataaaaaaaccggagccaaatgttcattcgactccggtttattattagaaaagatgattatgctacgtcttcgtactgcggaaccggattacggaagctcttggtgacgcaagccaggtaaatcagaccgatagcagcccagatcagacccagaaccatactgctttcttccaggttaacccacagcgcaccaacggtcagcgcaccacacatcggcaggaacagatactggaagtgatctttcagcgtcttgttacgcttctcacggatccagaactggctgatgacgctcaggttaacgaaagtgaacgccaccagcgcaccaaagttaatcagcgccgttgccattaccaggtcgaagttgattgccagcagggcaatcgcgccaaccaggatgatgttcatcgccggagtacgccatttcgggtgtacataaccgaagaagcttttcgggaatacgccgtcacgacccattacgtacatcagacgcgctacgcctgcatgcgccgccataccggacgccagtacggtaatggtggagaagatcagcgcgccaacctggaacgctttacccgcaacgtacagcatgatttcaggctgactcgcatccggatctttaaagcgagagatatccgggaagtacagctgcaggaagtaagttgcaaagatgaagatcatgccgccgatcagcgcggtcaggaaaatcgcacgcgggatcacgcgctctgcatctttggtttcttcgctcaggttgctgatgccgtcaaagccggtaaaggagaagcacaggattgtcgccccggtaatcatcgggataacatgcgcatcgccagaccagaatggacgagtgctcgccagcgtaccagcgccttcaccttcaaatacgccataaacaaccatgcccagaatcaccgcgatcagcactacctgcaacacgacgattacagtgttgaagttcgctacggatttcagactacgcaggttaaaggcggtcataaaggccaccagcgccaccacaaacatccagcttgggatggaaggcaccagagcttcaaaatagattttcgccagtagaatgttgatcatcggcgcgaacagatagtcgagcagagaagaccaacccaccataaagccgacagtcgggctaatggatttctgggcgtaagtgtatgcagagccagcagaaggatagcggcgaaccagcttcccgtagctcagagccgtaaacaggatcgcaatcaatgcgaacgcataggctgtcggcacatgaccatccgtgaggccactaacgataccaaaagtatcaaacagcgtcatcggctgcatataggcaagacccatcattacaaccggaactaacgtaagcgttttacgcaattccacgcgagaggtgtttggagtaacgttatggctcatggtcattctcctttacggtgataaccgtcgcgtaagcaaaaaattgccccatttttttggattcctcagcgacaacaactgtcgatttttagtaaatatctatccggtacgaagcccggcctcttggtatgaatgattggtttgaagcaaaaaataaccgacgctgatgaaacgtcggtttttagtcattttttgacagcggcgcattgtgcctaaatgggggggaaatgacaagagaatgagaggcttgtcagaataatttttctttaaatggcactttttccgtcatcagattttgcataaacaccggcgatcgcactatttgctaaaatttcatcccgccaccagccactggcaagtcctgcggtctgttcgttccagccaatccagacgggttcaaagagagtttgggcgaccactttcttctcgattaacgcgccactatcgagaaaacgttgcgccagataacggggtaaatagccgcagccgaggccgctaatttgcagctccagtttggttttaaaatcgaaaacggtaatggcttcttgttcgtcgagaagttgacttgccgtagaagcgcctgcctgcgcagtatcccccaccacaatcgcccgatatcgcttaataatacgacgatttaacggctcttcttccagggctaacggatgatgaggcgcgaccgcaaagacttgttccagatcgcccaaccgactaaaaccaaactcactggaagatggtggctcatgcatcgcgccaacaataatatccgctcgcccctgagtcagggcatcccaactaccaccgagtacgccattgataaacttcaggcgcgtcacgctatgatgttgataaaaagcttcaatgagtggcgcaagcagagaaaaaggaaacgtgtcgtccacgccaatcaccagctcgttttcccagccttcatgcagtttgatcgcctgcttttccagttcccgcacggtatgcagaacttcccgccctttctctaataacatttttccggtgcgggtgaatttagcgcggtgtccgctacgatcaagcaattgaatattaaggtcgctttccagcttgtgaacggtgtaactcagagcggacggcgtcttgtagagtttggcgctcgccgccgcaaaactgccttctttttctaaggcatcgaggatcatcaacacatccagcagtggtttcatacacgcccccttgcagtgcatgcggcgtcctgctggcgtgatcgtttactccagcggcattaccagcggatcgggatactggtattcaaatcccagttcattacaaatccgactgccatcaataatcttacctttgccgctgtccagactatttctgaactgcggaggttccagccccagtaaacgggccatctgcggatagaaaacattacgcgcagggtgagctggcgcacatatattatagatgtgtccgcctttaggtgcctgtaacaacagagtgatagcgccaataacatcttctaaatggactaaattaacaccatgttcaccatcaggcgcggtttttccggcaaagaagcgtccgggatgacgtcccggtccgaccaggcccgcaagacgcagaatatcgacgctagtaccgggtaaattgtgcagccagtcttcgagttcttctaatactcgtccactgttggttactggattacgcggggtggtttctttcaccgtgccttgcgcgtcgccatagacagatgtactgctggtaaaaataatgcggggaatacgatgggccagcgcgctatccactaactcttgtaccgcttgtaaatagaactcatcgccggggccgctacgacgtgccggaagcgtaatgaccagcgcatcggcatccatcagggcatccagatcgtcagaatcgcaaactagctcaggctccatgcgaagcagatagctatcaatgccactcattcgggccgcttcgacaccatcttgtgtggttttactcccggtgacttgccagcctcgcgcactaagactcatcgccagcggcatgcctaaccaccctaacccgacaattgcgacctttttcatccgttatctcctgatacaccttagatctataaggctacgctagcgtatcaaaactgacaattcattctatgaatgaatctgttcaataatgataacgacatgctgcaatgagcagactatcgtcggtaaccgcgtataccagacggtgctcctctgtaatgcgtcgggaccagaaaccactcaaattatgtttcaggggttctggcttccccttaccttcaaatggcgttctgcgggtatctttgataagttcattgatctttttaacaattcgcttatctgtttcctgccagtacagataatcgtcccaactttcctcagaccagattagtttcactcaatgatgtccttttccgttcctttgccacttttcaggctatcgatactgtccatcaatctccgggcgttagcgggggagcgcagtagataagccgtctcttccaggctgttgtattcttcgagactcatcagaacacaagcctctccattctgacgagtaataaggatcggggcatgatcttcaacggctttcatcattgttgcgctcaaattctgacgcgcttcgctgtagctaattgtacgcatgtcaatctcctcttttgtacagttcattgtacaatgatgagcgttaattaactatttattaattagtttgtagatcaaggtattgtcagtgagacgaaaatccaggcttcgctatttttggtgccatcagctaagaggacagtcctcttagccccctcctttccccgctcattcattaaacaaatccattgccataaaatatataaaaaagcccttgctttctaacgtgaaagtggtttaggttaaaagacatcagttgaataaacattcacagagacttttatgacacgcgttcaatttaaacaccaccatcatcaccatcatcctgactaatctttcaggcgatgtgtgctggaagacattcagatcttccagtggtgcatgaacgcatgagaaagcccccggaagatcaccttccgggggcttttttattgcgcggttgataacggttcagacaggtttaaagaggaataacaaaatgacagacaacactcgtttacgcatagctatgcagaaatccggccgtttaagtgatgacagtcgcgaattgctggcgcgctgtggcattaaaattaatcttcacacccagcgcctgatcgcgatggcagaaaacatgccgattgatattctgcgcgtgcgtgacgacgacattcccggtctggtaatggatggcgtggtagaccttgggattatcggcgaaaacgtgctggaagaagagctgcttaaccgccgcgcccagggtgaagatccacgctactttaccctgcgtcgtctggatttcggcggctgtcgtcttagcctggcaacgccggttgatgaagcctgggacggtccgctctccttaaacggtaaacgtatcgccacctcttatcctcacctgctcaagcgttatctcgaccagaaaggcatctcttttaaatcctgcttactgaacggttctgttgaagtcgccccgcgtgccggactggcggatgcgatttgcgatctggtttccaccggtgccacgctggaagctaacggcctgcgcgaagtcgaagttatctatcgcagcaaagcctgcctgattcaacgcgatggcgaaatggaagaatccaaacagcaactgatcgacaaactgctgacccgtattcagggtgtgatccaggcgcgcgaaagtaaatacatcatgatgcacgcaccgaccgaacgtctggatgaagtcatcgccctgctgccaggtgccgaacgcccaactattctgccgctggcgggtgaccaacagcgcgtagcgatgcacatggtcagcagcgaaaccctgttctgggaaaccatggaaaaactgaaagcgctgggtgccagtagtattctggtcctgccgattgagaagatgatggagtgatcgccatgagctttaacacaatcattgactggaatagctgtactgcggagcaacaacgccagctgttaatgcgcccggcgatttccgcctctgaaagcattacccgcactgttaacgatattctcgataacgtgaaagcacgcggcgatgaggccctgcgggaatacagcgcgaagtttgataaaaccacggttaccgcgctgaaggtgtctgcagaggagatcgccgccgccagcgaacgcctgagcgacgagctaaaacaggcgatggcggtggcagtaaagaatattgaaaccttccacactgcgcaaaaactgccgccggtagatgtagaaacgcagccaggcgtgcgttgccagcaggtcacgcgtccggtagctagtgttgggttgtatattcctggcggctccgccccgctcttcagtacggtattaatgctggcgactccggcgagtattgcgggctgtaaaaaagtggtgctgtgcagtccgccgccgattgccgatgagatcctttatgcggcgcagctgtgcggtgtgcaggacgtgtttaacgtcggcggcgcacaggccattgccgcactggcgtttggtacggaatctgtgccaaaagtggacaaaatcttcgggccgggtaacgcctttgtcaccgaagcgaaacgtcaggtgagccagcgtctggacggtgcggcgatcgatatgcccgcaggcccgagcgaagtgctggtgattgctgacagcggcgctacgccggatttcgtggcttctgatttgctctctcaggctgaacacggcccggacagtcaggtgattttactgacgcccgctgctgatatggcgcgtcgcgttgccgaggccgtcgaacgccaactggcagaactgccgcgtgccgaaaccgcccgccaggcactgaacgccagccgcctgatcgtgactaaagatttagcgcagtgcgtggagatctccaaccagtacggcccggagcacctgatcattcagacccgcaacgcccgtgaactggtcgatagcatcaccagcgccggtagcgtatttcttggtgactggagtccggaaagcgcaggtgattacgcctccggcaccaaccacgttctaccgacttacggttacaccgccacctgttccagcctcgggctggcagatttccagaagcgcatgaccgtacaggaactgagcaaagaggggttctccgcgctggctagtaccatagaaacactggccgccgccgagcgcctgaccgcccacaaaaatgccgttactttgcgtgttaacgcccttaaggagcaagcatgagcaccgtgactattaccgatttagcgcgtgaaaacgtccgcaacctgacgccgtatcagagcgcgcgtcgtctgggcggtaacggcgatgtctggctgaacgccaacgaataccccactgccgtggagtttcagcttactcagcaaacgctcaaccgctacccggaatgccagccgaaagcggtgattgaaaattacgcgcaatatgcaggcgtaaaaccggagcaggtgctggtcagccgtggcgcggacgaaggtattgaactgctgattcgcgctttttgcgaaccgggtaaagacgccatcctctactgcccgccaacgtacggcatgtacagcgtcagcgccgaaacgattggcgtcgagtgccgcacagtgccgacgctggacaactggcaactggacttacagggcatttccgacaagctggacggcgtaaaagtggtttatgtttgcagccccaataacccgaccgggcaactgatcaatccgcaggattttcgcaccctgctggagttaacccgcggtaaggcgattgtggttgccgatgaagcctatatcgagttttgcccgcaggcaagcctggctggctggctggcggaatatccgcacctggctattttacgcacactgagcaaagcttttgctctggcggggcttcgttgcggatttacgctggcaaacgaagaagtcatcaacctgctgatgaaagtgatcgccccctacccgctcagcacgccggttgccgacattgcggcccaggcgttaagcccatagggaatcgtcgccatgcgcgaacgggtagcgtaaattattgcagaacgcgaatacctgattgccgcactgaaagagatcccctgcgtagagcaggttttcgactctgaaaccaactacattctggcgcgctttaaagcctccagtgcggtgtttaaatctttgtgggatcagggcattatcttacgtgatcagaataaacaaccctctttaagcggctgcctgcgaattaccgtcggaacccgtgaagaaagccagcgcgtcattgacgccttacgtgcggagcaagtttgatgagtcagaagtatctttttatcgatcgcgatggaaccctgattagcgaaccgccgagtgattttcaggtggaccgttttgataaactcgcctttgaaccgggcgtgatcccggaactgctgaagctgcaaaaagcgggctacaagctggtgatgatcactaatcaggatggtcttggaacacaaagtttcccacaggcggatttcgatggcccgcacaacctgatgatgcagatcttcaccagccaaggcgtacagtttgatgaagtgctgatttgtccgcacctgcccgccgatgagtgcgactgccgtaagccgaaagtaaaactggtggaacgttatctggctgagcaagcgatggatcgcgctaacagttatgtgattggcgatcgcgcgaccgacattcaactggcggaaaacatgggcattactggtttacgctacgaccgcgaaaccctgaactggccaatgattggcgagcaactcaccagacgtgaccgttacgctcacgtagtgcgtaataccaaagagacgcagattgacgttcaggtgtggctggatcgtgaaggtggcagcaagattaacaccggcgttggcttctttgatcatatgctggatcagatcgctacccacggcggtttccgcatggaaatcaacgtcaaaggcgacctctatatcgacgatcaccacaccgtcgaagataccggcctggcgctgggcgaagcgctaaaaatcgccctcggagacaaacgcggtatttgccgctttggttttgtgctaccgatggacgaatgccttgcccgctgcgcgctggatatctctggtcgcccgcacctggaatataaagccgagtttacctaccagcgcgtgggcgatctcagcaccgaaatgatcgagcacttcttccgtagcctcagttacaccatgggcgtgacgctacacctgaaaaccaaaggtaaaaacgatcatcaccgtgtagagagtctgttcaaagcctttggtcgcaccctgcgccaggccatccgcgtggaaggcgataccctgcccagcagcaaaggagtgctgtaatgaacgtggtgatccttgataccggctgcgccaacctgaacagcgtgaagtctgccattgcgcgtcacggttatgaacccaaagtcagccgtgacccggacgtcgtgttgctggccgataaactgtttttacccggcgttggcactgcgcaagcggcgatggatcaggtacgtgagcgcgagctgtttgatctcatcaaagcctgtacccaaccggtgctgggcatctgcttagggatgcaactgctggggcggcgcagcgaagagagcaacggcgtcgacttgctgggcatcatcgacgaagacgtgccgaaaatgaccgactttggtctgccactgccacatatgggctggaaccgcgtttacccgcaggcaggcaaccgcctgtttcaggggattgaagacggcgcgtacttttactttgttcacagctacgcaatgccggtcaatccgtggaccatcgcccagtgtaattacggcgaaccgttcaccgcggcggtacaaaaagataacttctacggcgtgcagttccacccggagcgttctggtgccgctggtgctaagttgctgaaaaacttcctggagatgtgatgattattccggcattagatttaatcgacggcactgtggtgcgtctccatcagggcgattacggcaaacagcgcgattacggtaacgacccgctgccgcgattgcaggattacgccgcgcagggtgccgaagtgctgcacctggtggatctgaccggggcaaaagatccggctaaacgtcaaatcccgctgattaaaaccctggtcgcgggcgttaacgttccggtgcaggttggcggcggcgtgcgtagcgaagaagatgtggcggcgttactggaagcgggcgttgcgcgcgtagtggtcggctccaccgcggtgaaaagtcaagatatggtgaaaggctggtttgaacgcttcggtgccgatgccttagtgctggcgctggatgtccgtattgacgagcaaggcaacaagcaggtggcagtcagcggctggcaagagaacagcggcgttagtctggaacaactggtggaaacctatctgcccgtcggcctgaaacatgtgctgtgtaccgatatcagccgcgacggcacgctggcaggctctaacgtctctttatatgaagaagtgtgcgccagatatccgcaggtggcatttcagtcctccggcggtattggcgacattgatgatgtggcggccctgcgtggcactggtgtgcgcggcgtaatagttggtcgggcattactggaaggtaaattcaccgtgaaggaggccatcgcatgctggcaaaacgcataatcccatgtctcgacgttcgtgatggtcaggtggtgaaaggcgtacagtttcgcaaccatgaaatcattggcgatatcgtgccgctggcaaaacgctacgctgaagaaggcgctgacgaactggtgttctacgacatcaccgcttccagcgatggccgtgtggtagataaaagctgggtatctcgcgtggcggaagtgatcgacattccgttttgtgtggcgggtgggattaagtctctggaagatgccgcgaaaattctttcctttggcgcggataaaatttccatcaactctcctgcgctggcagacccaacattaattactcgcctggccgatcgctttggcgtgcagtgtattgtggtcggtattgatacctggtacgacgccgaaaccggtaaatatcatgtgaatcaatataccggcgatgaaagccgcacccgcgtcactcaatgggaaacgctcgactgggtacaggaagtgcaaaaacgcggtgccggagaaatcgtcctcaatatgatgaatcaggacggcgtgcgtaacggttacgacctcgaacaactgaaaaaagtgcgtgaagtttgccacgtcccgctgattgcctccggtggcgcgggcaccatggaacacttcctcgaagccttccgcgatgccgacgttgacggcgcgctggcagcttccgtattccacaaacaaataatcaatattggtgaattaaaagcgtacctggcaacacagggcgtggagatcaggatatgttaacagaacaacaacgtcgcgaactggactgggaaaaaaccgacggacttatgccggtgattgtgcaacacgcggtatccggcgaagtgctaatgctgggctatatgaacccggaagccttagacaaaaccctcgaaagcggcaaagtcaccttcttcagccgcactaaacagcgactgtggaccaaaggcgaaacgagcggcaatttcctcaacgtagtgagtattgccccggactgcgacaacgacacgttactggtgctggcgaatcccatcggcccgacctgccacaaaggcaccagcagttgcttcggcgacaccgctcaccagtggctgttcctgtatcaactggaacaactgctcgccgagcgcaaatctgccgatccggaaacctcctacaccgccaaactgtatgccagcggcaccaaacgcattgcgcagaaagtgggtgaagaaggcgtggaaaccgcgctggcagcaacggtacatgaccgctttgagctgaccaacgaggcgtctgatttgatgtatcacctgctggtgttgttgcaggatcaggggctggatttaacgacggtaattgagaacctgcgtaaacggcatcagtgagttgcggggtaagcggatgcgatattgttgccgcatccggcaaaaaaacgggcaaggtgtcaccaccctgccctttttctttaaaaccgaaaagattacttcgcgttgtaattgcgtagagcattacgccccagcacaatccccgcgccaaccatgccacccagcagcaccgccagaatcaaggtaattgcctttttcgggctatcacgacgaataggtaacatcggtttcatcacataacggtaagcatgaatatcaagatcatcaacttttaagctttcgatatccagcaggttttgacgagtctgatagtagtttgggctgaacaccaacggacgggtcgcctcatgcttaatcatgctctccagcgcttcgctccccaaaaggaacaacgtatcttgtgtgatatcttcgccagtctgttgaatctgcggttttgtcacctgcgcctgattcgcatactgcaacgcttcctgaatctgacggatacgcagatctttctgctcctgcgcgactacttcctgcgttcttaaagagtcctgcaagtttttccgtcccagagcaatgttgtctttgagatccttttctagctcttgattcactttatcgtcaacttgctgaatgtattgggccaacttcatttgtgcgccctctgcagtttgcccaacataagaaacagtcaatggtaattgctggttcttaacagaaggttcgatggtaagtttttctcgttcttcctgattatccagcgtttctgctaatgcagagaaggcagaactgaagcgaccaattaacgtctcctgcaaatcgcttactttcggtgcagcctgaccatagataacattcatggcattgttatagccagcaatttgccccacgtcgggctgagtgataattgctgtactcgtccatttctccttcgctactgccaaatatccaatagccagggcaatagccacaatgacggaaatgatgattgtcatcttgccacgccacaactgcactagtaaatcaatcaaatcaatctgttccgggtcatggttttgcccagaaacattattattttctactctcatcattaccctaactgacggaaatttccaagtccgcatagtttagcgataatcctcgtgaatgctataggataagtgataaaaataatgaattgttgtgtaagtaacaaaagacaatcagggcgtaaatagccctgataacaagatgttagtcgctgccaaagagatcgcgggtgtataccttatctgccacatccttaagctcttctgccattcggttagagataatgacgtcggcttgttgtttgaaggtggcgagatcacgttccaggcgagagttgaagaaactgtcttctttcatcactggctcgtagatgatcacttcaacacctttcgccttgatacgtttcataatcccctgaatagaagacgcacggaagttatcactaccgctcttcataatcagacgataaatacccaccacttgcggcttgcgactcaaaatggcatcggcaataaaatctttacgcgtgcggttagcatcgacaattgcgctgatcaggttattcggcacagactggtagttcgccagtaactgcttggtatctttcggcagacaataaccaccataaccaaagctcggattgttgtaatggttgccaatacgtgggtcgagacaaacgccttcgattatttgacgggaattcagacctaaactttctgcatagctatccagttcgttaaagtacgccacgcgcatcgccaggtaggtgtttgcaaaaagtttaatcgcttctgcttcagtggagtcggtaaacagcatcgggatattttgcttaatcgcgccttcctgtaacagagcagcgaaacgttctgcgcgttcactacgctcaccgatgacaatacgactaggatggagattatcgtaaagggctttaccctcacggagaaattccggggagaatataatattttcagtgcgatatttcttatgcatcgctgcggtaaaaccaacgggaaccgtacttttgatgaccataaccgcataaggatttatctcaactacgtctttaattacactttctacactggatgtattgaaataattagttttaggatcatagtcggttggagtggcgatgatgacataatcagcatcccggtaggcttcatttttatctaatgtggcattaaagtgtattttatcactttgcaaaaactgctgaatttccttatcaacaataggagatatccgatcattcagcatagcaacgcgactcggtaaaatatctaatgccacaacctcatgattttgtgcgattagaagcccgttactcaagcctacatagccagtaccggaaatggtgattttcatttcatgctctcagaattaacttaactgtgaatcatgatgtttttagcatcctgataagagctaaaagttttaacgctacgttgttcgatggtcaacgcaacgaaaaacaattcagattttctttataagaatagctgatatttattaagttaatattaagcagtgaaatttagtctataagatatttggcaaaaaaaagcccggtgcaatatacgccgggcctcaattttattgttggttaaatcagattaatccagccattcggtatggaacacaccttctttatcaatacgcttataagtatgcgcaccaaaatagtcacgctgtgcctggatcaggttcgcaggcagaacagcagcacggtagctgtcgtaataggcaaccgctgcggagaaggtcggaaccggaataccgttctgtactgcataagcaacgacatcacgcagcgcctgctggtagtcatcggcaatttgcttgaagtacggagccagcaacaggttagcgatctgtggattttcggcataagcatcggtgattttctgcaggaactgcgcacggatgatgcagccagcacggaaaatcttcgcgatttcgccgtagttcagatcccagttgtactcttcagacgcagcacgcagctgagagaagccctgggcgtaagaaacgattttgcccagatacagcgcacgacgaactttttcgatgaactcagccttgtcgcctgctggctgtgcttgcggaccagagagaactttagatgcggcaacacgctgatctttcagagaagagatataacgtgcaaacacagactcggtaatcaggctcagcggttcgccgagatccagcgcgctctggctggtccatttaccggtacctttgttagccgcttcatccaggatcacatcaaccaggtagttaccgtcttcatcttttttggtgaagatatctttggtgatgtcgatcaggtaactgctcagttcaccgttattccactcggtaaaggtctgcgccagttcttcgttggtgaggttcaggccacctttaagcagagaataggcttcagcaatcagctgcatatcgccgtattcaataccgttgtgaaccatcttcacatagtgacctgcgccatcggcaccaatataggtaacgcatggttcaccgtcttcagctacggcggcgattttggtcaggatcggtgctaccaattcataggcttctttctggccaccaggcataatagaaggacctttcagcgccccctcttcaccgccagaaacaccggtaccgatgaagttaaagccctctgcactaagctcacgattacgacgaatagtgtcctggaagaaggtgttaccaccatcaatgatgatgtctcctttatcgagatatggtttgagggaatcaatagcagcatccgtgcctgcacctgctttcaccattaacaggatgcgacgaggcgtttccagagattcgacaaactctttcaccgtatagtaaggaaccagtttcttgcctggattttcggcaatcacttcttccgtcttctcacgggaacggttgaaaatagagacggtataaccacggctttcgatgttgagcgcaaggttgcgtcccatcactgccataccgactacgccgatctgttgcttggacattacatactcctgtcaggtgtgatcaccgcgctgaatgctcgcggcctggaatgttcgcaaataagtatacaaagtacttattaaagtataaatagcttatccatgcttatatgcttacggctttatatgtctccacatgcgatatttcttaaataatgttttattattaccacttttaattcagggataatgtgaggttattaccctcaaataatatgagataaatagtgctgcaacattgcatttttgccccgatttatccatgatcgaattgtgacatttgtcatacaacgaataggttttgtacttactatggaatggattgccgatccgtctatctgggccgggttaatcacgctgattgtgatcgaactggtcctcggcattgataacctggtctttattgccatcctcgccgaaaaactaccgccgaagcagcgtgaccgcgcacgggttaccgggctgctgctggcaatgttaatgcgcctgttactgctggcgagtatctcctggctggtcaccctgactcaaccgctgttcagcttccgcagctttacctttagcgcccgcgacttaatcatgctgtttggtggtttcttcctgttgttcaaagccacgatggagctgaacgaacggctggaagggaaagacagcaataatcccacacaacgcaaaggtgcgaagttctggggcgtggtgacgcaaattgtggtactggacgccattttcagtctcgacagtgtgattaccgccgtcgggatggtcgaccatttactggtcatgatggccgccgtggttatcgctatcagcctgatgttgatggccagcaagccgttaacgcaatttgttaacagtcacccgacgatcgttattctctgcttaagcttcctgttgatgattggctttagcctggtggcagaaggtttcggcttcgtcattccgaaaggctacctgtacgctgccattggtttcagcgtgatgatcgaggcgctcaatcagttggctatctttaaccggcgacgttttctttccgctaaccagacgctgcgccagcggactaccgaagcggtaatgcgcctgcttagcgggcaaaaagaagatgcggaactggacgccgaaaccgcgtccatgctggtggatcatggtaaccagcagatctttaatccgcaggaacggcggatgattgagcgggtacttaatcttaaccagcgtaccgtcagcagcattatgacgagccgccacgatattgagcatatcgatctcaacgcgccggaagaagaaatccgccagttgctggagcgaaatcagcatacgcggctggtggttaccgacggtgatgacgcagaagatttgctcggtgttgttcacgttatcgacctgctacaacagtctctgcgcggcgaaccgctcaacctgcgggtgttgattcgccagccgctggtgttcccggaaaccttgccgttgttacctgccctggagcagttccgtaatgcccgcacgcactttgcttttgtggtggatgagtttggcagcgtggaagggattgtgacattaagtgacgtcactgaaaccattgccggtaacttaccgaacgaagtggaagagatcgacgcccgccatgatattcagaagaatgcggacggttcctggacggcgaatggtcatatgccgctggaggatctggtgcaatatgtgccgctgccgctggatgaaaaacgtgaatatcacaccattgccgggctgttgatggagtatttgcagcgtattccaaaacctggcgaagaagttcaggtgggggattatttgcttaaaacgttgcaggtagaaagccatcgcgtgcagaaggtgcagattataccgctgcgtaaggatggcgagatggagtacgaggtgtgatggtatcggtcattttacccaatagccgaaaggaataagatgagggaaccgcgccatcggcgatttaccgccgggagcccgggttgccagggtggtggagattgagccaccctggcacgttcaccggcttgagcgttccatagtagcgaggaacatcaagtgaacggaacagccttcgatcttacatattcagaatataatgatgccgccacgaacgcctgatgcgacgctttacgcgtcttatcaggcctacaggactggtcacctggtaacttacatcttctccagcaacttcttcacatctttgccattacgggaatctttattccgctcggcccagtcattcaggcgacgtttcgcttcgtcctgtagatgtttgcgcagtaactgatccacttgcaggctgtaattgagttgctgccagttgccataaacccgcagcggtactggcgtttctttcaggaaatcaatcagtttgctttccccgttccagccacccacgacccgaatatcaaactgggtgtcgcaggtttgatctgccagattcaacatgccttcccctgtcagcgccagcacagggctttgaccttgcatgtcgtttaacgtcacgacgccatccttcaacgtcaaatcggtggtaaagcggtcaagccgcgtcacgttatcaaagttttcagcggccttcacatcaccgccattacgctctaccgcttgctgaatcatctgctggaagttcatcccttccatgcgcgtgtcggtcatttcgacatgtgcctgtccttgccagttgtggcggaatgcgtcggcatctatgtcagcaccggagaaatcaccagccagactcatttttccggtcaagctaatcggatagttaaacgccttcagaatggtaccaatctcaacgttttccagccgtggctggaagtttatccgcggatttatacttgtcgcgtccagcgtgcccggcagactaacctgtccaccgttaagtttgccctgcagttgagtaatttccagcaaaccgctcttgttggtcatttgcgtggcaacatctgtaaaattcattccgcgccagcgcacgttactggcctgcaacaaaatatcagccgtaaagccttgcagtccctgataggccggttcatcaatacggctagaaatgaccgggcgcggcaacgtactttggctctgcccctgctgcgcggcaccgttttcaccattcgcggtttcattaagcgggatgaggttgtcaagattcagttgcgggaattgcagcctcagctgccattccggtttctctgtcagcgtaacctgtgcttgcccgcttagcgtactatcattggcggtcaaactaatttggttaaaactaaggcgtttatgactctcctgccactgggcctggaaactcccctgcccctgaataccttgttttggtaaatcggcaccctgcaactgccagttaatttgttcaatagccgccgttaaatcatgcggataatcagaagcatctaccgtaccgttaagggatatcgtgagatcgcgctgatcgcgattaacccgcccggagaactcaaaactaccacgatgttggggatcttgttccatttgcaggcgaatattgcggattgtcacctgctcgtcatcttcatgctggaacaccagcacgctgtccgccaccttaagactggatatatcaaagctccatccgcgatcgtcactcagatccggcaaggtattgtcgcgcggtgcaaccggagcgtcttcactgcgcaccgcttccgtctgcggcgtcagttggatcactgccccttttagcatcacctgcttaacgctcagttgatgactcagtagtggtaaaagcgccacgtccagacgcatgttgtcggcgcgaaccagtggctggcttgcgccctgggcggtgagagacattcgcccggagaggatactaagctgcggccagacgtgccaacgcagtggcccgtcgagctgcaattgataaccgctacgtgcagcaacttgcttgaccatatagtcgcggaaatcattcggattcaccagcaacactaacgcagataacccggccaccagcacgaccaggagtatcatcagcgtcgtcagaaatcgtctcatggtatcctcaatgggcctgaattagtctttatcgattcggctggctaccgcgccctgctggttgcgatatttcgcatcttcacggcggttgtaaggtcgcaccgccgggccggaaagcggctcaaagctcagcgcaccaattaacatgcccggacgcagcgccagcggcagcttaccggagttgtagaactccagcacaatgcaaccagaccagcccggatcgatgcggtgcgcggtgacgtgcaccatcagccccagacgcgccagactggaacgcccgtccagccagcccaccagatcggctggcagcgtcacgctctccagcgtcaccgccagcgccagctctcctgggtgaagatagaacgcctcgccctcgtcgagaacgatctcatcgctcatcacgcggtcaagcgcggcgctcacttcatctttgggaccgctcagatcgataaacgctgccgtgtgaccacggaaggtacgaaatttattgcccaggcgtacatccaccgtcgcgccgttaatacgctccactggcggacgtgggttgatgctcaaacggccttcatcaagccaggcttcaatatctcggtcacacagacgcatggcattttctcctttcgcgcatcactcccttaacgccaattacgtcaagggcatactaggttatcactgaacggtacacaatttatcaagcttattcaaagaactgacttattttcgctttcaatatatcgatcgcgatgcggtttttcccgccgcgcggcacgataatgtccgcatattgtttagaaggctcaatgaattgcaggaacatcgggcgcacggttttttgatattgcgccatcacactatccatactacgcccacgctcgttaacgtcacgcttgatgcggcgcatcaggcagatatccagcggggtatcaacgaaaatggagaagttaagttcgtcacgcaaacgcgcatccgtcagcaacaaaatgccttcgagaatgatgaccttcttcggctcaaccgtcaccgtttctttcatacgcgtatgttcaacatagctgtaaaccggcaggtcaattgcgctgccgcgtttcaacgcttgtaaatgctcaagcagcagactgtgatccatcgcgctgggatggtcgtagttggtcttaacgcgttcttccatgctcagatggctttgatctttgtaatagcagtcttcgggaattacgccgatgtgttcatcaccgacttgctcacgcaattcacgataaagggtactggcaataagactcttgccggaagcgcttgcgccagcgataccgataatgacgcactgatgagactgatcagtcatatatttagcgacctgattaacctggatgttaggaagggggcgacgaagcgccaaacgcggcaattatagggatttcatccgtctgataccagtcgaatagcgttgccgcgcgctcagagttaattgttgacaaagaattcccgggggcaaattacgttgatcagttttatgtaaggtaaaaaatgttaaacgcagttgcgcaaattatccgcctttacgtcactttatgagcaattcgcatataaaatgtaaaacttttgtactagcataaacacagaaacgaatactggcgaccaggtcttgcggataaagcggtaatgagcaaacaaagtcagcatgtattaattgccctgccccacccgctgcttcacctggtcagtttaggtttagtcagctttatctttacccttttcagccttgagcttagccagtttggcacccaactcgccccactgtggttcccgacgtccatcatgatggtggcgttttatcgccatgccgggcgcatgtggccgggaattgcgctgagctgtagcctgggaaatatcgccgcatccatcctgcttttttccaccagcagcctgaacatgacctggacgaccatcaatattgttgaagccgtggtcggggcagtgctgctacgtaaattgctgccgtggtataaccccttgcaaaatctggctgactggctgcgtctggcactcggcagcgccattgttccgcctctgttggggggtgttctggttgtcctgctgacgcccggagacgatcctctcagggcatttttgatatgggtactgagtgaatccatcggcgctctggcactggtgccgctgggattgttatttaaaccacactatctgctgcgccatcgcaacccacggttgctttttgagagcctgctcacgttagccatcacactgacgttaagctggcttagcatgctgtatctgccgtggccttttactttcattattgtgctgttgatgtggagcgccgtgcgtctgccacgaatggaagcctttttgatcttccttaccacggtgatgatggtgagcctgatgatggccgcggatccccccctgcttgctacgccgcgtacgtacctgatgagccatatgccgtggctaccgtttttgctgatcctgctgcccgccaacatcatgaccatggtgatgtatgcctttcgtgcggaacgcaaacacatttccgaaagcgaaacccactttcggaacgcgatggaatattccgctatcggtatggcgttagtgggcaccgagggacaatggctgcaaaccaacaaagcgctctgccagtttctcgggtacagtcaggaagagctgcgcggactcacctttcagcaactgacctggccggaggatctcaataaagatctccaacaggttgaaaagctgataagcggtgaaataaacacctatagtatggaaaaacgctactacaaccgcaatggcgatgttgtctgggcgttgcttgccgtcagtctggtgcgccacacggatggcacgccgctctattttatcgctcagattgaagacattaacgagctaaaacgcaccgaacaggtcaatcagcaactgatggagcgcatcactctggctaacgaagcgggcgggattggcatctgggagtgggagttgaagccgaatatttttagctgggataagcggatgttcgagctgtatgaaattcctccacatatcaaaccgaactggcaggtgtggtacgagtgcgtgctgccggaagatcgccagcatgccgaaaaagtgattcgtgatagcttgcaaagtcgcagcccctttaaactggaatttcgcattaccgtaaaagacggtattcgccatatccgcgccctcgccaaccgggtactgaataaagaaggcgaagtcgaacgtctcctcggcatcaatatggatatgaccgaagtgaaacagcttaacgaggcattgtttcaggaaaaagagcgcctgcacattacgcttgattccatcggtgaagccgtggtctgtattgatatggcgatgaaaattacctttatgaatccagtggcggagaagatgagcggctggacgcaggaagaagcgttaggtgttccgctcctgacggtgttgcatattacttttggcgacaacggaccattaatggagaacatttacagtgccgacaccagtcgttccgcgatcgagcaagatgtggtgttgcactgtcggagcggcggcagttacgacgtgcattacagtattacgccgttaagtactctggacggcagcaatattggtagcgttctggtgattcaggacgttaccgaaagtcgcaaaatgctgcgccagctgagctacagcgcctcccatgatgcactgacgcatctcgccaaccgcgccagttttgagaaacaactgcgtatcctgctgcaaacggtaaacagtacacatcagcgacatgccctggtgtttatcgatcttgatcgctttaaagcggtgaatgacagcgccgggcatgcggcgggtgacgctttgctgcgcgaactggcgagcttaatgctgagtatgctgcgttccagcgacgtgctggcgcgactcggtggggatgaatttggtctgctgctaccagactgtaatgttgaaagcgcgcgttttatcgctacacgcattatcagtgccgtgaatgactatcactttatatgggaaggccgtgtgcatcgggtaggtgccagtgccgggattaccttgattgatgacaacaatcatcaggcggcagaagtgatgagccaggctgatatcgcctgttatgcctccaaaaatggtggccggggccgggtgacggtttacgaaccgcagcaagctgccgcacatagcgaacgggcggcgatgagccttgatgaacagtggcggatgattaaagagaatcagttgatgatgctcgcccacggtgtcgctagcccacggatcccggaagcgcgtaatttgtggctgattagtcttaagctctggagttgcgaaggcgagattattgatgaacaaacatttcgtcgtagcttcagcgatccggcgcttagccatgctcttgaccgccgggtattccacgaatttttccagcaggccgcaaaagcggttgccagtaaaggcataagcatctccctccccctttccgttgccggtttgagtagcgccacgctggtgaatgatctgcttgagcagctggaaaatagccctctaccaccacggttattacatctgattattccggctgaagcgattttagatcacgcagaaagcgtgcaaaaactgcggctggcgggatgtcggatagtgctcagccaggtgggccgcgatctgcaaatcttcaacagcctgaaagcgaatatggcagattacctgctacttgatggtgagttatgcgccaacgtgcagggtaatttgatggatgagatgctgattacgattattcaggggcacgctcagcgactcgggatgaaaaccatcgccgggccagtcgttttacccttagtgatggatacgctttctggcatcggcgtcgatctgatttatggtgaggtgattgccgatgcccaaccgctggatttgctggtgaatagtagttatttcgcgattaactgaggcgtgcttccccatcgcctgatgcgacgctaacgcgtcttatcatgcctacaaatcgctcattccccaggccggataaggcgctcgcaccgcatccggcgaccaacgtcatgcttcgtctggttgccagccttccgtataccagatatgcaacagcgcataagaacgccagggcttccagcgctcggcataacggcggatttgcgccggtgtcattcccggaaatcgctgtttaatcagataatcatccggcaggaaaacatctttcgcctgccagccacgcaaagcaaaataattcgccgtccagcgcccgatacccggaaaagtttgcagcgttttcatcgcctgctccacatcgcccggtattgtcattggtaaggtgccctccagcgccgcatttgccagatgaatcagcgcctctgcccgtttcaacggcatacctaacgcttttaatgcctgcgggtctgctgctgccagccgctgaggcgtcgggaagcagatatactccggaaaatcatccagccgttcgccataaagctgtgccactctggcggtcaattttgccgccatcgccacgctcaccagttggcctaaaatcgcccgcacgccctgctcaaaagcatcaacacagccgggtaaacgcaatccgggccgcgccgcgcctaacctgcccaacgcaccgttaacaatttgtgggttacattgcagatcaaacaggcggctcattttcgccagacactctgcggcaacaggttctaaacctgcacttaaatttatgtgcagagtatggcgggctatatccggaatagcagtcaccacgccgcgatattcgcccaccgccagactacgggcataataactgtccgcgaccgtttccacactgctcaccgcacgggcggcgagaaatcccaacatccagctccagtcatacggcggctgccagttcagggtatacatcgcatctccttattcatccgctttcagcataaacgttattcagacgctgcgctttgctttcatattccggttgtcgcgacggcaacatttcgctaaagtcacgccccttcttcaccggcatggggattatttcgtgtttattggttttgattacggtacagcaaactgtagtgtggcggtcatgcgtgacggtaaaccgcatttgctaaaaatggaaaacgacagcacgctgctgcctagtatgctttgcgcgccaacgcgtgaagcggtaagcgaatggctgtaccgccatcatgatgttccggcagacgacgatgaaacgcaggcgctgttacgtcgggcgattcgttataaccgcgaagaagatatcgatgttacggcgaaaagcgtgcagttcggtctttccagtctggcacagtacattgatgatccagaagaagtgtggtttgtgaaaagtccaaaaagcttcctcggtgccagcggcttaaaaccgcagcaggtagcgctgtttgaggatctggtctgcgcaatgatgttgcacattcgccagcaggcgcaggcacagctgccagaagcgattactcaggcggtgattggtcgtccgatcaacttccaggggctgggcggtgatgaagcaaacacccaggcgcaagggattctggaacgcgcggcgaagcgtgccggattcagggacgtggtattccagtacgagccggtcgcggctgggctggattacgaagccaccttgcaggaagaaaaacgggtgctggtggtggatatcggcggtggtacgactgactgtagtttgctgctgatggggccgcagtggcgtagccgtctcgatcgtgaagccagcctgctgggtcacagtggttgccgtattggcggtaacgatctggatatcgcgctggcgtttaaaaacctgatgccactgctgggtatgggtggcgaaaccgaaaaaggcatcgccctgccgatcctgccgtggtggaatgcggttgccatcaacgacgtacctgcgcagagtgatttctacagtagtgccaacggtcgtctgcttaacgatctggtacgcgatgcccgcgaaccggaaaaagtggccctgttacagaaagtctggcgtcagcgtttaagctatcgcctggtgcgtagcgcagaagagtgcaaaattgctcttagtagcgtagcggaaacccgcgccagtctgccgtttatcagcaatgaactggctacgctgattagccagcgagggctggaaagcgccctcagccagccactgacgcggattctggaacaggtgcaactggccctggataacgcccaggaaaaaccggacgttatctacctgaccggcggtagcgcccgttctccgctgattaaaaaagcgctggcagaacagttgccgggcattccgattgcaggcggcgatgactttggctccgtcaccgccgggctggcacgctgggcggaagtggtgtttcgttaattgaaaaatggctcagcagcggcttaaatctgcctgcgcctgagccagtttttctgctgcctgacgtaacggttccatcaacggcatggtccgtgctggagcatgaaggcggaatcgctgcaactctgtcgcgccgactgtcaacgcgctttccagccgatgtcgtttggcggtcattttcgccattaccgcttgtctgtctgctggcgttatcgcttcattcggcctgaacacaaaacggcgttcacagctcgctttccagtcgataaccgcctgggtcagatggtcgccaaaccctttcacttgcttaacgccacgacgggtaacatctgcggctgtttcaataccaaaagaccgtaacgccgctttacgcgcagggccaacgccgggaatagaggcaacatcaataaaaaatccctccagaaacttctgcttctgccgttcccttgcagtgtcatgaagtgctgccagagcgcgtttctcttcttccggtaacccgagaatttcgtccttcattttttcgagcatcgtccgtttggcgataaaaccttccaggccgcctacctgctggatctggcggactaaatggtcatagtccattttcgcacgattaaatgcctcacggcgttgctgaacttctgctttgtacgctttgcttgtcagactgccaataatccagatagccgccagcacaggaaccaaaataatataacgcggttctgcctgaaggccgcaaagcagcaggcttaatgcactcagtgcgatctcaagcagaatgatgtattcgcgccgtaacaggcctaaaggaagcggcctgccagtcggttggaaatgatcgggtaatggcagttgcaatgctggcggtgctacactcgccatcaccatcgcccagactttcgccagcacaaaattcccgccggtggtaatgacctcttcgccgagatcaataaaatagataacaccttgattatccagcgcacaccacgggcagtcagtcaaatgagcggggtaaacatgcattgcactaacgatacatttctttaactgttggcgtagagagtccagtgccgctacccacgctttagccgtcggacgcccggttgccacgccactttccgtgaatgcctgctgaaacatggcttcaacatcactcggtaacatgcttagcggaatagatcgtggcggcggttttaaaccacgtcgctgattatcactcgcgtaggcataacggaaatgggtaatatccgtctccagcgcattacccgcatcagagataagcggcacaccagaataaggatgccgcccaccaaacaagacgtgaaaaattagcaacgcaaggccaaaattatcgtgattttctgtgcgttcaaaaccgacaaaacttggcaaggtttgtagctctggcggcgtaaaatggctcacgccgacttcgcataaatgcagtgtgccattggcgttaatttgaaaggagtcgctatcaatcagtaccactttgctgtcgcgacctaccataaaactgttctggtttacgtcacccacgacgtgcccgtgctcgtgaaccgtagcaaaagaactagcaatattgcgcgcaacatagagtagaaaatcccacgcacaatgagggtaactctggcgacgatgtgccgggctatagatcatatgaatcggttctttaccagaaacttttggcatcataaaaccgataacttttccgcctcgtccaccgtgaagcgttgcctgcggccaggcgacataattcaacaactgcgcgtcagctgtcgcagccataaaggcaagtttgtcctgttttaaggcgggtggcggcgtgtgataaatcttggcgacgctatcgacaaactcctcgatatcataaaccgcgccttcaccacctttgcccagttcacggccaagagtggtcaattcacctgtgcttgtaaatacttttatatttgttttcataatatttcgcgggtagttatattatatttcaatgaataataacaactaaccattaaaattatttctatatggggaaaacccactcaagaataaaaatgataatgcaattttatcaggatacaattcaatttcggcctgataatgattaacttccacaggtttttgctaactttgactacaaagggattctggagaaaaaatgaaaaagatattacttatgttgagtctgctattttttactaccgcgggctttagtgaagttagcgatacgttagtgacgggaggttatgataaacaagcgatgtctgacgcgattaaacatgcgcggaaagaaaccgataaattcatcgaggttatgaataaaaaagatgccgatactttcgcagtcaaagccccgataaccgatcacggaagaaccgagcatttctggcttacggatgtcacttattctaacggcatgtttattggcgtaatcagcaatgaccctggtattgttacaaacgtagaatatggccaggagtggaaaatcaagaaagaagatattagtgactggatgtatacgcgcggggataaaatttacggcggttataccattgatcctttattggtcacctatccaaaagaagaagccgacgagctaagagcaaaattagttcgctaatcagccgttatatttattgtttaaactggcggttgaattgttgtcttcaaccgccatgagaaactcactctgcccacagcgccagtgccaacgttttatcatcatccgtacgctcgtttaccgccgggctggacaaaaactgctttaacaattcaggtaataaatcgagttgttcctgcgttgctgccgccagtccattgaaaaacggggtaaagaaaggcacatgaggagaattatccagcatatttaacgccagtcgctggataccatccgtaaatgctgcaactttgtgcgcacgcccagtgctggtgagagtttccagtctggaaacggcatcttcgtcggtaatgaagtgcgtcatgttggcatattcacccgccatcggcgtgagaggcaattgcagaccgtgacccaaatctaccaccacgccgccatcgccaatctgcataatcaaggtgccgtcagggctactaatcagtcccagaaatgtgcaggcaaaatcgcgaaccgctaattctttggcttccgcctcggcaaaaagtcgttgacgaatggtcagtaccatatttgtggcgaggacatcattaagccccaattccccgccctgcactttttggctcatataagccatcgcttcattgacggcgagcatcgcgccttcgccaccctggctgacactgcctgcgccatcagcgacaaatacgctcaataatggctgctggtcatttaaccaggcaatctgcatctggcaggcatcctgacaaggcaagtccgcgctgatgtggctcgttccaacggtacttgcatagaccagacgccagctcacacactcgtccagccttttggcgcttccagcacaacttccgttcccggcgtggagcgggaaacgctacgcaggctactggataaccagctaaacagttcacggaattgtaatccttgcagaggcaaaggctgacgaacgctaatttgtgccagcgtcttcatatccgccccctgaacaccgatggaaaagaaagcaaaccttttatcttcttccccccgaaacactttgttggctgcagcctgccactcatcggttggtgcaccatcggtaatcaggaaaatccacgggcgataatagctaataccatttgcacgatactcacgtttccgctcctctaccatatccagggctttggtaatggccgcacccattggtgtatcgccctgggcaaacaggatgggcggaaaaaaattagcggcgctggtaaagggttgttccacatgcaccgggccgaacgtcacaatgccgagttccactctttttaaagccagcggatcagcaagcagttcatcacgaaaggtaaccaatccggcgttaagttcattaataggtctaccgttcatagaaccagaaacatccagcagcaaaatgcaggggcaacgtggttccgggttactggcaaaatcgctggtggcaaacgtgatttgttcgctcataagaaatcctttcttagagaattatcgaggtccggtatcataccgactgcaataatgaaataagagcaaacgaagaaactttcagaattaggcccggcggcgcagaaaattttgctattcgcctcgcaagaacggagagccgtcgattgacactaagggcggagtgacataatttcaggagtgagggttagggagaggtttccccctccccctggtgttcttagtaagcctggaagctaatcactaagagtatcaccagtatgatgacgtgcttcatcataaccctttccttattaaaagccctcttctccgggagaggctttcccgtttcagcgtcccgctgaaatcatcggcttacctcctttcgccctgaatgcagtctatcgctaacgcgtgaataaaatagtttcctctgtgattattgcgtaacgactcgcaaagaatatttgctggcaggatcgcagactacaaagcctgcggattgacaatcttatcgtgaagacatactttcaggagtgagggtagagcggggtttcccccgccctggtagtcttagtaagcggggaagcttatgactaagagcaccacgatgatgagtagcttcatcatgaccctttccttatttatggccccttcctcgggaggggctttcccgtttcagcgtcccgctgaaatcgtcggcttacctcctttcgccatgcaagcagtctatcgctaacgcgtagataaaatagtttcctgtgttattactggatgcgtgctcgcaaatgtgcccgtcattcagacgattccagacagtgtttcataattcctccatttttctcccttattggctggctacactagtatcattccgcgaaacgtttcaggaagagaaactcttaacgatgaaaggtagttataaatcccgttgggtaatcgtaatcgtggtggttatcgccgccatcgccgcattctggttctggcaaggccgcaatgactcccggagtgcagccccaggggcgacgaaacaagcgcagcaaagcccagcgggtggtcgacgtggtatgcgttccggcccattagccccggttcaggcggcgaccgccgtagaacaggcagttccgcgttacctcaccgggcttggcaccattaccgccgctaataccgttacggtgcgcagccgcgtggacggccaactgatagcgttacatttccaggaaggccagcaggtcaaagcaggcgatttactggcagaaattgaccccagccagttcaaagttgcattagcacaagcccagggccaactggcaaaagataaagccacgcttgccaacgcccgccgtgacctggcgcgttatcaacaactggcaaaaaccaatctcgtttcccgccaggagctggatgcccaacaggcgctggtcagtgaaaccgaaggcaccattaaggctgatgaagcaagcgttgccagcgcgcagctgcaactcgactggagccggattaccgcaccagtcgatggtcgcgttggtctcaagcaggttgatgttggtaaccaaatctccagtggtgataccaccgggatcgtggtgatcacccagacgcatcctatcgatttagtctttaccctgccggaaagcgatatcgctaccgtagtgcaggcgcagaaagccggaaaaccgctggtggtagaagcctgggatcgcaccaacagcaagaaattaagtgaaggcacgctgttaagtctagataaccaaatcgatgccactaccggtacgattaaagtgaaagcacgctttaataatcaggatgatgcgctgtttcccaatcagtttgttaacgcgcgcatgttagtcgacaccgaacaaaacgccgtagtgatcccaacagccgccctgcaaatgggcaatgaaggccattttgtctgggtgctgaatagcgaaaacaaggtcagcaaacatctggtgacgccgggcattcaggacagtcagaaagtggtgatccgtgcaggtatttctgcgggcgatcgcgtggtgacagacggcattgatcgcctgaccgaaggggcgaaagtggaagtggtggaagcccagagcgccactactccggaagagaaagccaccagccgcgaatacgcgaaaaaaggagcacgctcctgatgcaggtgttacccccgagcagcacaggcggcccgagccgcctgtttattatgcgtcctgtggccaccacgctgctgatggtggcgatcttactcgccgggattatcggttatcgcgccctgcccgttagcgcgctgccggaagtggactatccgaccattcaggtggtcacgctctacccaggtgccagcccggatgtcatgacctctgccgttaccgcgccgctagaacgccagttcgggcagatgtctggcctgaaacagatgagcagccaaagttccggcggtgcgagtgttatcactttgcagttccagctaacattaccgctcgatgtcgccgagcaggaagtgcaggccgcgattaacgctgcgaccaacttgttgccgagcgatctgcctaacccgccggtttacagcaaagtgaacccggcagatccgccgatcatgacgctcgccgtcaccagtaccgccatgccgatgacgcaagtggaagatatggtggaaacccgcgtcgcgcagaaaatcagccagatttccggcgtcggcctggtgacgctttccggcggtcagcgtccggctgttcgcgtcaaacttaacgctcaggcgattgccgccctcggcctgaccagcgaaaccgtgcgcaccgccattaccggcgctaacgttaacagcgcaaaaggtagcctcgacggcccttcccgtgcggtcacgctttccgcgaacgaccagatgcaatccgccgaagagtatcgccagctaatcatcgcctaccagaacggcgcgccaattcgtctgggcgatgtcgcaactgtagagcaaggtgcagaaaacagctggctcggcgcgtgggcgaacaaagaacaggccattgtgatgaatgttcagcgccagcccggtgctaacattatctccaccgccgacagcattcggcagatgctgccacagctcactgagagtctgccgaaaagcgtgaaggtgacagtgctttccgatcgcaccaccaatatccgcgcatccgtcgatgatactcagtttgaattgatgatggctatcgcgctggtagtcatgattatctacctgtttttgcgcaatattccggcgaccatcattcccggtgttgctgtaccgctgagcttaatcggcactttcgcggttatggtgtttctcgattttagtatcaataacctgacactgatggcgttaactatcgccaccggattcgtggtcgatgacgccatcgtggtgatcgaaaacatttcccgctatatcgaaaaaggcgaaaaaccgttggcggcggcgctcaagggcgcaggtgaaatcggctttaccattatcagcctgaccttcagtctgattgcggtgttgatcccactgctgtttatgggcgatatcgtcgggcgactgttccgcgaatttgctattaccctggcggtagcgattttgatcagtgcggtggtgagcctgaccctgacaccgatgatgtgcgcgcggatgctcagccaggagagcttgcgtaaacagaaccgcttctcccgtgccagcgaaaaaatgttcgacaggataatcgccgcctatggtcgtggactggcgaaagtgctgaatcatccgtggctgaccttaagcgtggcactcagcacgctgctgcttagcgtgctgctgtgggtgttcattccgaaaggtttcttcccggtacaggacaatggcattattcagggcactttgcaggcaccgcaatccagctcctttgccaatatggcccagcgacaacgccaggtcgcggacgtgattttgcaggatccggcagtgcaaagcctgaccagttttgttggcgttgatggcactaacccgagcctgaacagtgcacgtttacaaatcaacctcaaaccgttggatgaacgtgatgatcgggtgcaaaaagtcatcgcccgtctgcaaacggcggtagataaagtgccgggcgtcgatctcttcctgcaaccaacgcaggatctgactattgatactcaggtcagccgcacccagtaccagtttaccttgcaggccacgagtctggatgcgctcagtacctgggtgccacagttgatggaaaaactccagcaactgccacagctttctgatgtctccagcgactggcaggacaaagggctggtggcgtatgtcaatgttgatcgcgacagcgccagccgtctggggatcagcatggcggatgtcgataacgccctgtacaacgcgtttggtcagcggctgatttccactatttatactcaggccaaccagtatcgcgtggtgctggagcacaacaccgaaaataccccaggcctcgcggcgctggataccattcgcctgaccagcagcgacggcggcgtggtgccgctaagcagtattgccaaaattgagcagcgttttgcgccgctctccatcaaccatctggatcagttcccggtaacgaccatctcctttaacgtgccggataactatagcctgggcgatgcggtgcaggcgattatggacaccgaaaagacgctgaatctgccggtggatatcaccacgcagttccagggcagcaccctcgccttccagagcgcgctgggcagcactgtctggctgattgtcgcggcggtggtggcgatgtatatcgtgctcggcattctgtacgagagctttattcacccgatcaccattctcagcacgctacccaccgcaggggttggcgcactgctggcgttgctgattgctggtagcgaactggatgtgattgcgattatcggcattattttgctgatcggtatcgtgaagaagaacgccatcatgatgatcgacttcgcgctggctgctgagcgcgagcaaggcatgagcccgcgcgaggcaatctaccaggcttgtctgttgcgttttcgtccgatcctgatgaccactctggcggctctgcttggcgcgctgccgctgatgttgagtaccggggtcggcgcggaactgcgtcgtccgttaggtatcggcatggtcggcggtctgattgtcagccaggtgctgacgctgtttaccacgccggtgatttatttgctgttcgaccgcctggcattgtggaccaaaagccgctttgcccgtcatgaagaggaggcgtaagtgaagttttttgccctcttcatttaccgcccggtggcgacgattttactgagcgttgccattaccctgtgcggcatactgggcttccgtatgctgccggtcgccccgctgccgcaggtcgattttccggtgattatcgtcagcgccagcctgcccggtgcgagtccagaaacaatggcgtcttccgttgccacgccgctggagcgcagtcttgggcgcattgccggagtcagtgaaatgacctccagcagtagcctcggcagcacgcgtattattttgcagtttgattttgaccgggatatcaacggcgcagcgcgtgatgtgcaggcggcgatcaacgctgcacaaagtttgctgcccagtgggatgcccagccgcccgacctatcgcaaagcgaacccgagcgatgcgccaattatgatcctcacgctgacgtccgatacttatagccagggtgaactgtacgatttcgccagcacgcagctggctccgacgattagccaaatcgacggtgttggtgatgtcgatgtcggaggcagcagtctgcccgccgtacgcgtcgggctgaatccgcaggcgctgtttaatcagggcgtgagcctggacgacgtacgcaccgccgtcagcaatgccaacgtgcgtaaaccgcagggcgcgctggaagatggcactcaccgctggcagatccagaccaatgatgagctaaaaaccgccgctgaatatcagccgttgattattcactacaacaacggcggcgcggttcgtctgggcgatgtggcgacggtgaccgacagtgtgcaggatgtgcgcaacgccgggatgaccaacgccaaaccggctattttactgatgatccgcaaactgccggaagccaatattatccagacggttgacagcatccgggcaaaattaccggagttgcaggaaaccattccggcggcgattgatctgcaaattgcccaggatcgctcccccaccattcgcgccagcctggaagaagtcgagcaaacgctgattatcagcgtggcgctggtgattctggtggtgtttttattcctgcgcagcggtcgcgccactattattcccgccgttagcgtgccggttagcctgattggtacgtttgcggcgatgtacctgtgcggattcagtctcaataaccttagcttaatggcgctcaccatcgctactggtttcgtggtggatgacgccatcgtggtgctggaaaacattgcacgtcatctggaagcgggaatgaaaccgttgcaagccgcactgcaaggtactcgcgaagtcggttttacggtgctgagcatgagtctgagtctggtggcggtgttcctgccgctgctgttgatgggcggattgccgggccgactgttacgcgaatttgccgtgacgctttctgtcgccattggtataagcttgctggtttctctgacattaacgccaatgatgtgtggctggatgctgaaagccagcaagccgcgcgagcaaaagcgactgcgtggttttggtcgcatgttggtagccctgcaacaaggctacggcaagagtctaaaatgggtgctcaatcatacccgtctggtgggcgtggtgctgcttggcaccattgcgctgaatatctggctgtatatcagcatcccgaaaaccttcttcccggagcaggacactggcgtgttgatgggcgggattcaggcggatcagagtattagctttcaggcgatgcgcggtaagttgcaggatttcatgaaaattatccgtgacgatccggcagtggataatgtcaccggctttacaggcggtagccgagtgaacagcgggatgatgtttatcaccctcaagccacgcgacgaacgcagcgaaacggcgcagcaaattatcgaccgtctgcgcgtaaaactggcgaaagaaccgggggcgaatctgttcctgatggcggtacaggatattcgcgttggtgggcgtcagagcaacgccagctaccagtacacgttgttatccgacgacctggcggcactgcgagaatgggagccgaaaatccgcaaaaaactggcgacgttgccggaactggcggacgtgaactccgatcagcaggataacggcgcggagatgaatctggtttacgaccgcgacaccatggcacggctgggaatcgacgtacaagccgccaacagtctgttaaataacgccttcggtcagcggcaaatcagcaccatttaccagccgatgaaccagtataaagtggtgatggaagtggatccgcgctatacccaggacatcagtgcgctggaaaaaatgttcgttatcaataacgaaggcaaagcgatcccgctgagctatttcgctaaatggcaaccggcgaatgccccactaagcgtgaatcatcagggattaagcgcggccagcaccattagctttaacctgccgaccggaaaaagcctcagcgacgccagtgcggcgatcgatcgcgcaatgacccagcttggtgtgcctagcacggtgcgcggcagttttgccggcacggcgcaggtgttccaggagacgatgaacagccaggtgatcctgattatcgccgccatcgccacggtgtatatcgtgctgggtatcctttacgagagttacgtacatccgctgacgattctctccaccctgcccagcgcgggcgttggagcgctgttggcgctggagctgttcaatgccccgttcagcctaatcgccctgatagggatcatgctattaatcggcatcgtgaagaaaaacgccattatgatggtcgattttgcgcttgaagcccaacggcacggtaacctgacgccgcaggaagctattttccaggcctgtctgctgcgttttcgcccgattatgatgactaccctggcggcgctgtttggtgcgctgccgctggtattgagcggcggcgacggcagcgagctgcggcaacccctggggatcaccattgtcggcggactggtaatgagccagctccttacgctgtataccacgccggtggtgtatctctttttcgaccgtctgcggctgcgttttagccgtaaacctaaacaaacggtaaccgagtaaatgacagatcttcccgacagcacccgttggcaattgtggattgtggctttcggcttctttatgcagagcctggacaccaccatcgtaaacaccgcccttcccagtatggcgcaaagcctcggggaaagtccgttgcatatgcacatggtcattgtctcttatgtgctgaccgtggcggtgatgctgcccgccagcggctggctggcggacaaagtcggcgtgcgcaatattttctttaccgccatcgtgctgtttactctcggtagtctgttttgcgcgctttccggcacgctgaacgaactgttgctggcacgcgcgttacagggcgttggcggcgcgatgatggtgccggtcggcagattgacggtgatgaaaatcgtaccgcgcgagcaatatatggcggcgatgacctttgtcacgttacccggtcaggtcggtccgctgctcggtccggcgctcggcggtctgctggtggagtacgcaagctggcactggatctttttgatcaacattccggtggggattatcggtgcgatcgccacattgctgttaatgccgaactacaccatgcagacgcggcgctttgatctctccggatttttattgctggcggttggcatggcggtattaaccctggcgctggacggcagtaaaggtacaggtttaagcccgctgacgattgcaggcctggtcgcagttggcgtggtggcactggtgctttatctgctgcacgccagaaataacaaccgtgccctgttcagtctgaaactgttccgtactcgtacctttagcctgggcctggcggggagctttgccggacgtattggcagtggcatgttgccctttatgacaccggttttcctgcaaattggcctcggtttcagcccgtttcatgccggactgatgatgatcccgatggtgcttggcagcatgggaatgaagcgaattgtggtacaggtggtgaatcgctttggttatcgtcgggtactggtagcgaccacgctgggtctgagcctggtcaccctgttgtttatgactaccgccctgctgggctggtactacgttttgccgttcgtcctgtttttacaagggatggtcaacagcacgcgtttctcctccatgaacaccctgacgctgaaagatctcccggacaatctggcgagcagcggcaacagcctgctgagcatgattatgcaattgagcatgagtatcggcgtcactatcgccgggctgttgctgggactttttggtagtcagcatgtcagcgtcgacagcggcaccacacaaaccgtctttatgtacacctggcttagcatggcgttgatcatcgcccttccggcgttcatctttgccagagtgccgaacgatacgcatcaaaatgtagctattagccggcgaaaaaggagcgcgcaatgaagttctggcgacccggtattaccggcaaactgtttctggcgattttcgccacctgcattgtcttgctgatcagtatgcactgggcggtgcgtatcagttttgagcgtggctttattgattacatcaagcatggtaatgaacagcgattacaactgttaagtgatgcgcttggcgagcagtatgcgcagcatggcaactggcgcttcctgcgcaacaatgatcgctttgtctttcagatcctgcgtagttttgaacacgataatagcgaagataaacccggcccgggtatgccaccgcacggctggcgtacccagttctgggtggttgatcaaaacaacaaagtgctggttggtccgcgagcgccgattccacctgacggtacacggcgacccattctggtcaacggtgcggaagttggcgcggtgatcgcctcccccgttgagcggttaacgcgcaatactgatatcaatttcgataaacaacagcggcaaaccagctggttgattgtcgccctggcaacgttactcgcggcacttgccacttttctgctggcgcgcggtttactggcaccggtaaaacgacttgtcgatggcacgcacaaactggcggcgggcgatttcactacccgcgtaacgcccaccagtgaagatgaactgggcaaactggcgcaagacttcaaccagcttgccagcacactggagaaaaaccagcaaatgcggcgcgattttatggccgatatttctcacgaactgcgtacgccattagcggtgctgcgcggtgaactggaagccattcaggatggcgtgcgtaaattcacgccggagacggtggcgtctttacaggcggaggtcggtacactgaccaaactggttgacgatctccatcagttgagcatgtctgatgaaggcgctctcgcctatcaaaaagcaccggtagatttgatcccactgctggaagtggcgggcggcgcatttcgcgaacgattcgccagtcgtggcctgaaactgcaattttccctgccagacagtattaccgtatttggcgatcgcgaccgtttaatgcagttattcaataacttactggaaaacagcctgcgctacactgacagcggcggcagcctgcaaatctctgccgggcagcgcgacaaaacggtgcgcctgacctttgccgacagtgcgccaggtgtcagtgacgatcagctacaaaaattgtttgaacgtttttatcgcaccgaaggttcccgcaaccgtgccagcggcggttccgggctggggctggcgatttgcctgaacattgttgaagcacataatggtcgcattattgctgcccatagcccttttggcggggtaagcattacagtagagttaccgctggaacgggatttacagagagaagtatgaccgagttaccaatcgacgaaaacacaccgcgtattttgatcgtggaagatgaaccgaagctggggcagttgctcattgattatctgcgtgctgcgagctatgcgccgacgcttatcagccacggcgatcaggtactgccgtatgtgcgccagacaccaccggatctgatcctgttagatctgatgctccctggcaccgatggcctgacgctgtgccgggaaattcgtcgtttttctgacattccgatcgtgatggtgacggcaaaaatcgaagagatcgatcgcctgctggggctggagattggcgcagatgattatatctgtaagccgtacagcccacgggaagtggtagcgcgcgtcaaaaccattttgcgccgttgcaaaccgcagcgcgagttgcagcaacaggatgctgaaagcccgttgattatcgacgaaggtcgttttcaggctagttggcgcggtaaaatgcttgacctgacgcctgcggaatttcgtctgctgaaaacgctctctcacgaaccaggaaaagtgttctcccgcgagcaattgctcaatcatctttatgacgactaccgcgtagtaaccgaccgcaccatcgacagccacattaaaaacctgcgccgcaagctggaatctctcgacgccgaacagagttttatccgcgccgtttatggcgtcggttaccgctgggaagccgacgcctgccgcatcgtttaattttagcgacattattttgttagccggagatggcgttcagaccagatccggcaacattatcccacgcatggtcagcaaactgacattatctctccgccctggcaggcatcagaaaatcgctcatactttaatcggtaaacagcacctttagaatcctgtcgtttgttttcgatttcaaaatataatgaaattatttgtttttaaatatcgagataacgatcacaaaaacgacaatatgaaaattattcgaggagtgaaaggcaaaaaaacggcctcccgatagggaagccgtagcaaagtgcgcgtgtttttatgccggatgcggtgtaaacatacgtggcagtgctatgtaggcatgataagacgcttcagcgtcgcatcaggcataggttgccggatgcagcgtaaacgccttatccgtcctacggggtggtgttgttcgtataaggcgtatcaggcgatagtaattttgctatcgagataaacgtcctgcacggcgttaatcagtttcacgccgtcagccatgcttttcttgaacgctttacgtccaagaatcagccccattccgcctgcgcgtttgttgataaccgcagtacgcactgcatcgctgaggtcagtttcaccgcccgcagcaccgccggagtttatcaacccagcccgacccatatagcagttagctaactgataacgcaccagatcaatcgggttttcgctggtcaatttgctgtaaacacgatcgtcggtgtaaccgtaattaattgctttatagccgccgttattttccgccattttttgtttgacgatatctgcaccgatggttgccgccagatggtttgcctgaccggtcaggtcggcggaaacatggtaatcaacgccatctttcttaaaggcggagttacgcaaataggcccacagcactgtcaccatacccagctcgtgcgcacgttcaaaagccgcagaaatttcttcaatctggcgacgactctcttcgctgccaaaatagatagtcgcaccaaccgcaaccgcgcccatgttgaacgcctgctccacgctggcatacagcgtttgatcgtaggtattcgggtaacttagcgtctcgttgtgattaagtttgacgaggaatggaatgcgatgcgcataacgccggcttacgctcgccagcacgccgtaagtactcgccacacagttacagcccgcttcgatcgccagttcaacaatgtttttcgggtcaaagtagagcgggttagcagcaaaactagctccggcagagtgctcaacgccctggtcaaccggcagaatagaaagatatcctgtgccagccagacgcccggtgttgtacaacgtctgcatattacgtaacaccgctggcgggcgattattgtcaatcattacgcggtctacgtagtcatgtccggggagataaagctggtcagaaggaattgtcatacaacggtgctgtaaaaggttgtcggcgtctttgccaagcaactgcgcaatatctgtcattactatgctcccgtaaattccgattggatatcggctatggattgtcctggcccgccttttgcgggcaatcataatcctggtcgttacgggcgagtttttccatcttttggatgttttttcagcgttttctgttggctcgattcatcagaaaaaatgttagcgcggtcaagttttcaccgcaaaggtatttaaaaggtattattaagtggtattgtcatcgcgtaccttacattacctgtcatgaaggaattaaaagatgaaaacaacagcaaagctgagcttcatgatgtttgttgaatggtttatctggggcgcgtggtttgtgccattgtggttgtggttaagtaaaagcggttttagtgccggagaaattggctggagctatgcctgtaccgccattgcggcgatcctgagcccaattctggttggctccatcactgaccgctttttcagcgcgcaaaaagtgctggcggtattgatgttcgcaggcgcgctgctgatgtatttcgctgcgcaacagaccacttttgccgggttcttcccgttactgctggcctacagcctaacctatatgccgaccattgcgctgactaacagcatcgcttttgccaacgtgccggatgttgagcgtgatttcccgcgcattcgtgtgatgggcactatcggctggattgcctccggtctggcatgtggtttcttgccgcaaatactggggtatgccgatatcagtccgactaacatcccgctgctgattaccgccggaagttctgctctgctcggtgtgtttgcgtttttcctgcccgacacgccaccaaaaagcaccggcaaaatggatattaaagtcatgctcggcctggatgcgctgatcctgctgcgcgataaaaacttcctcgtctttttcttctgtagtttcctgtttgcgatgccactagcgttctattacatctttgccaacggttatctgaccgaagttggcatgaaaaacgccaccggctggatgacgctcggccagttctctgaaatcttctttatgctggcattgccgtttttcactaaacgctttggtatcaaaaaggtattattgcttggtctggtcaccgctgcgatccgctatggcttctttatttacggtagtgcggatgaatatttcacctacgcgttactgttcctcggtattttgcttcacggcgtaagttacgatttttactacgttaccgcttacatctatgtcgataaaaaagcccccgtgcatatgcgtaccgctgcgcaggggctgatcacgctctgctgccagggcttcggcagtttgctcggctatcgtcttggcggtgtgatgatggaaaagatgttcgcttatcaggaaccggtaaacggactgactttcaactggtccgggatgtggactttcggcgcggtgatgattgccattatcgccgtgctgttcatgatttttttccgcgaatccgacaacgaaattacggctatcaaggtcgatgatcgcgatattgcgttgacacaaggggaagttaaatgaaaacagaacgtattctcggtgctctttatgggcaggcgttaggggatgcgatggggatgccctccgagctttggccacgcagccgcgttaaagcacactttggctggattgaccgttttcttcctggaccaaaggagaataacgcggcctgttattttaaccgcgccgaattcaccgacgataccagcatggcgctgtgtctggcggatgcgttactggaacgtgaaggcaagatcgatccggatctgattgggcgtaatattctcgactgggcgctgcgtttcgacgcctttaacaaaaacgtactaggtccgaccagcaagattgcgcttaacgccattcgcgacggtaaacccgttgctgaactggaaaacaacggcgtgaccaacggcgcagcgatgcgcgtcagcccattaggttgtttgcttccggcgcgtgatgttgattcctttattgatgatgtagcgctggcgtccagcccgacccataaatccgatctggcggttgcaggcgcggtagtcatcgcatgggcgatttctcgtgccattgacggagaaagctggagtgcgattgttgattccctgcctagtattgcgcgacatgcacagcaaaaacgcatcactacgttcagcgccagtctggcggcgcggctggagattgcgctgaaaattgtgcgcaatgccgacggcaccgaatccgccagcgaacagctttaccaggtcgttggcgcaggtaccagcactattgagtccgttccgtgcgccattgcgctggttgaactggcacaaaccgacccgaatcgctgcgccgtcctgtgcgctaaccttggcggcgacacagacaccatcggtgctatggcgacggcaatttgcggcgcgttgcatggcgttaacgctatcgatcctgcgttaaaggcggaactggatgcggtaaatcagcttgatttcaaccgctatgccacagcgctggcgaaatatcgtcaacaacgggaggcggtatgagcggcgctcgattacacacgctgctgcctgaattaaccacgcgtcagagcgtgatggtcgtcggcgcggcggtcattgacgtgatcgccgacgcttatgccctcccctggcgtgggtgcgatatcgaactgaaacagcagagcgttaacgttggcggctgcgcactgaatattgccgtggcgttaaagcgcctcggcatcgaagcgggtaatgccttgccgctcggtcagggcgtgtgggcggagatgattcgcaaccggatggcaaaagagggcttaatcagcctgatcgataacgccgaaggtgataacggctggtgtctggcgctggttgagccggatggcgaacgcacttttatgagtttcagcggtgttgaaaatcagtggaatcgccagtggctggcgcgattaaccgttgcgcctggcagcctgctctatttttccggttatcaactggccagcccctgcggcgaattgttagtggaatggctggaagagctgcaagacgtgacgccgtttatcgattttggcccacgtattggcgatatcccggatgcattactggcgcggatcatggcctgtcgacctttagtgagcctcaatcgtcaagaggctgagattgccgccgaacgttttgctttatccgcagagataacaacacttggcaagcaatggcaggagaaatttgccgcgccgttgatcgttcgtctcgataaagaaggcgcatggtatttcagcaacgacgcttctggctgcattccggcatttccaacgcaagttgtcgacaccattggggcgggcgacagtcatgccggtggcgtacttgccgggctggcctctggtctgccactggcggatgccgtattactgggcaatgcagtggcgagctgggttgtcgggcatcggggcggtgattgtgcgccaacgcgcgaggaactactcctcgcacacaaaaacgtataattactcctcgcacacaaaaacgtatagatcgctgcgacagtggctaatgctgtactcaataggccgttgctgttggtcaagcgccacttgcttgatcaccagcaccggtattttgctatctaactgaatatgactctgaaactcggcatccggcatccgggcgctaacgcgggaacgcgtacgttgtgggtaaatgtgctggctgcggaaatagtcataaagactaatcccgatggcatcaacatcatgaattaaatgcgccggaacccagctttcctcaatgcttaccgcttcttcatcgacatagcgaatacgcttaagcaaaaagacatcacttcctgcttcgaccgccagctgctgcgcgacttcttcgggacatttcacgacacgcttgttaacccatagcgtatcgggctttttcccgcgcaataccacctgctgagaaaaacctcgcgcttctttcaagctgtattcgaagatgttgttgatctgcgtgccgtaaccgcggctacgcgtcaccacaccctcttcttccagcgcctgcatcgccttgcgcaccgtaatgcggctaacgccggttaactgacttaaatcacgttcaccgggcaaaatattgccatgctccagcaccccgctgcgcacggcattttttaccgtttcggcaaacttaatataaagcggcgtgttatccgccgctaaaatacgctcgttcagttgggcaatcagctgggtatgcgcttgttccatttgtctttttcctgccggggagtctggtgggagtatatcactgcttcttatttaaggcgtttctttaatcccatcaacgaatgcctgcaactcctccaccgtgccattaaatacattaaaatccaccggaccattgatgccatctacctgtccacggtcggaatgctgccagaagcgccaggccattccgtcattgtccggacgacgttgatagtagtgagccacccaccacggatattcattgaaatagcccgccagattggtgtgataaaaaacggctccactgtaaataatcggctttttccccgtacttttttcgaccatttttagccactgacttacccgcttgcgtaattcttttgcgcttaattttccccgttcttctacgtccagcacggcagggaaatcgccttgactgaaatccaccgtttgcagaaataatctcgcctgaacactagcggatacgctcggggagaaataatgatacgccccacgcagcaggccattttcgcggcttagttgccagttacggctaaaataggggtccaccagcttttcgccttccgtcgccttaataaaagcaaactgtaagcggataccattgtcgcgcatttttgccacccgctgccagtcgatccgctcctgccagcggctaacatctattccgtgaatggtgtaactggcaggaatgcgaatagcgaaagatttaaccgggcgataaccgtagaagtggatgtagtctgtaatctgaactgctgtgctatagaaaaaattcaccgtctgacgcggataaattgcaacgatggaaattagcccaagagcgcataatagagaggtgagtttttttcgactggtaattcttagctgcattggtttcatccctgaatgtcagtgccaaaggctgacaataaccaaagcagctatagtacggcgctcaccaccaggcgtggaagtggtgaaccggaccaataccgtgaccaacttccagcgtgtcggcctgggctaacgcgctactaagccagctttttgcctcctgtacggtgtcagcccagtttgtatggcgcgggcgtagtgcagccaacgccgcagagagtgtacaaccagtgccgtgggtgtttttggtcataatgcgcggtgcggtaaaccgttgttcaccctcgcgggtaaacagccagtccgggctttgctcatcatccagatgaccacctttcattagcactgcgccacagcccatcgccaacaggcttcgcccttgttccagcatttcctgttcggtgcgcgcgtgtggcgcgtcgagcaaggcggcagcttcgggcaagtttggcgttattaaactaacctgtggcaataatcgactgcgcagcgtagcaaccgcgctaggactaagcagcgggtcgccgctttttgccagcataacggtgtcgagtaccacgttttggatctgataacgttgcaaccgttctgccaccgcttcaacaatatcggtttccgccagcataccgattttagtggtatcgattcgcacatcgctgaacacgctatcgagctgggcggcgacaaaatcaggctcaatgcgatacacgctctgtacgccacgggtattttgcgccaccagtgcagtaataacactgcaaccataagcgccaagtgcgctgaaggttttaagatcggcctgaatccccgcaccaccactcggatcagtaccggcaatcgtcagagcgttaattcgtttcatgcctgcacctcctgcgtcaattgccagagcgcatcaaggaaatgtggaacaaaactgcctggcccctcgcttctggcgactgcgcgttctccggcttgtttcatccagtgacaggcagatgcgacattttccagcgtatcgcctggtaacgcacagcaggcagcgacaaccgcgcttaatgcacagccagttcctaccactttggtcattaacggatcaccaccgtgaataccaatgatacgatgtccatcggtaacataatccatctcgccagtgaccacgacgattgcgccagtttcccgtgccagtgtttgtgcagcgggtatcgcgttagctgcggcgtcagtggtatccactccccgtccgccattagcaatgccagctaatgccatgatttcgctagcattaccacgtatcgctgccggtttaaaagataaaagttcatgacaaaaatggcggcgataatcgagcgcacccaccgctactggatcaagcgtccagggtgtttgagagctttttgcttgctcaacggcagcacgcatcgcctgagcgcgtggctgcgtcagtgtgccaacgttaatcaacaaggcactggcgatagccgcaaactgactggcctcttcggtttcgataaccatcgctgggcttgcaccgagcgccagcaaggtattggcggtaaaggtttgcaccacatcattggtcatgcagtgcacaagaggggaatgttggtgaaaaaggtgtaacgcgtgcgcagattgcgcactacccagcaggtcgacttgcatagtttgctcctgccataacgtgaagaagcaatgacctggtggtccgtgacttccctacgctggcattatccagatcaggtgatacgggtatttctcagccttcacgcagaagggcaccccgagtcgtttggttgcgatgataaatcgcagaggaggatggtaatgtccagcgcacgcgttgtaaacgaggaaaaacggcagttttacaatcgcgttaataaattatttgatataactatccagcaccttcagaacgacatccagatcttcttcacgttttagctcatccccctggtgaacgatgtgttccgtcagatgacctttaatcacttcccgcatcagaccgtttaccgcgccacggatagcagcaatctgttgtaaaactgcagcgcattcgtgcggctcgtcgagcattttcttgagcgccacgacctggccctgaatcttactggcacgcgctttcagtttctgtttatcacggattgtatgagacatggcaacacctggttaacaagaatatgaaaaatcatagcactattaatctactggggggtagtatcaggtactgggggggagtagaatcagattgccgaattaatactaagaattattatcatgaccgaatttacaactcttcttcagcaaggaaacgcctggttcttcatccccagcgccatcttacttggtgcgcttcatggcctggaaccagggcacagtaaaacgatgatggcggcgtttatcatcgccatcaaaggcaccattaaacaagcggtgatgctcggactggcagcaactattagccataccgcagtggtctggttaattgcctttggcgggatggtgatcagcaagcgctttactgctcaaagtgcagaaccgtggctccagctgatttccgcagtgatcattattagcaccgcgttctggatgttctggcgtacctggcgcggcgaacgcaactggctggagaatatgcacgggcatgattatgagcatcatcatcacgatcacgaacatcaccacgaccatggacatcatcaccatcacgaacatggcgagtatcaggatgcccatgcacgagcccatgccaatgacattaaacgacgctttgatggtagagaggtcaccaactggcaaattttgttatttggcttaaccggtggccttatcccctgcccggcagcaattaccgtgctgttgatatgcattcagttgaaagccctgacactgggcgcaacactggtcgtcagtttcagcattggcctggcgttaacgcttgtcaccgtaggcgttggcgcagcaatcagcgttcagcaggtcgcaaaacgctggagcggatttaacactctcgctaaacgcgccccctatttttccagtctgttgattggcttagtcggtgtgtatatgggcgtacatggcttcatgggcataatgcgataactcaatcctttaggcttgcatgttatcttcagcccaggatgattcttaaatcagctatttccgctgactctctgctcgctaaggatgcttttagggcatcctttcatttacactttttacgaaatcatgggatcactaacaaaatatcgcttgtcagttatattgtatggcaggaaagatatgcgactgatattacagatccccaaagtggagagtttatgaccattaaaaataagatgttgctgggtgcgcttttgctggttaccagtgccgcctgggccgcaccagccaccgcgggtagcaccaataccagcggaatttctaagtatgagttaagtagtttcattgctgactttaagcatttcaaaccaggggacaccgtaccagaaatgtaccgtaccgatgagtacaacattaagcagtggcagttgcgtaacctgcccgcgcctgatgccgggacgcactggacctatatgggtggcgcgtacgtgttgatcagcgacaccgacggtaaaatcattaaagcctacgacggtgagattttttatcatcgctaaaaaaagccccctcatcatgagggggaaatgcagacaccttgttattttttattattagccacttgctcgtcttgcttgttattagtcgtatttcacgttgattaatgcggttgcctccagtgcgccagatttaactttgtttgtatcgtagacgtagtaactggctgttatcggaatactaaccgttgtatctgtaagtttactcttcgccgcaacttcctttaaatttgtatatcctttactgctgttagtgatatttaaaagtgtgactgggctaccattactttcaagaataaatcctacgccattatcttccgcacctttcagtattgtgttgctgttggttaacaagtcagaactacttaaatacacctgcattttccgacttgtttgattttgttgacctaataaatttttacaacgcagaataatatccccttgtttactatttattgttgctttgttacctgtggctggtaattgactaacgggaatactgtctaaagtaattaataaatcgtccggtttgcaggttgtggttatcgggttgtaactcaatgtcagattaaaggaatagacacctgcattttgtgccaatgcatttctgtagctatttacacatgcatcccaactcttgccacctaataaacacagtagaaattgtactgcggcactcccgcgtgtgctactactagcactggataatgtcgcaacaccattaatcatcacactaccgccgccccccgcagaaacattcacttttgcattactggccgcaggtgtcaccgtaacactataaccactggtgaaactggtctgattattactcaacgtgatgttgtttttattggtccattcaaaatgtaaatttaattttatggtatcgttataaagtccaacaataatatcgctcgggctcataggggtgatagtatttgtacttacgcaactgctatcattaaaattatgctcatatgtcgccatttgtgtttgagtaagtgcaaaatccccctgaacaaccaagttgtgctgaacagataactcactataacatgccgcatagctcacaggcataaccatcatcattaatataaatagcattatgcgaatttccatagaaccacctgactattactggcaaatataatttctactttcatcaatctctttaccgaaggtgattgtgcaactaagtccttgttgcttatcaattgccacattaacgcttggcggtacttcattggtgcgaataaataactgacttccctggccgacaacgccaatattatgaccatggatatcattgacttcataaccaaacgttaaactttgcccatctgctcttaacgcttttataaaccatggcttgcgctgatcggtatcaaaattaaccagtacaaccgcgccgcgataaggggcggcaattttccggttgccacgtaattctgcttcgctatcgctttggctcacatccagcatcaggtgattttcccgataaggtgtcattccgtcgtatatcaccactccattacggtttgttgtgcgatatttttgcccattgacataagcatctttaattcctggcgcattcatcacagcaaacgtttcggaaagacggttcgccagattaacgccaccgctccaggcgacaatgcccccactaacactggctccagcctgtcgataagtactgctctgactataactgccattcactgtcgcaaccggcgcgttccaggtcaaattcgccccagctgtcgtttcatttccctgatgttgatgactcaggttgacaccataattgaactgatcccgactccctactgttccacttaatcccgtattattactggcaaacccctgatcatcaaacgtcgtactgttagacatatatatttgccgacgaggcgtgctaacgtcatcaccccaatcaaagggaatgcttataaaaatattaaaacgtttctcttcatgatgattctcgtcataagcctggcttgccgcgagggtatagcttatccgtcgcaggttgttggaataactcaactgataatccttactactgccgctacgcccccagtaatctcgccataacgtacttaaactcacagacccccaaccttctggcaaactctggctcatattggcggaaaagctatttttgcggccaaaatcgttctggtaataatcggcaatgtcatagacatcgttttcatcacggcgataattatctttattgtttgcccaaacgtgatcgttaaatgtccggtaatcacggctgctataacgccaggccgccagaccaaaacgcgtgctcgtttggctcacaaacttgttgtaggcaatttgataactttgcccgtcaaacacatcgccgttgtcttgtttactatggctcttagtggcatcgacggaaatggcaccaatgcgtgtattccagccagcccccaaagtaaacgcgtaataattattcgcgaccatgctgccaccatacagcgtcaataaattattaaaaccatactgataacccgcctggacaaaatcactttgtttgctcgccccttcaatatggctacgacccgccgctaaatcatatttgctcacgccgggttgcagcatatttggcaccgctgcataaggcaccagataggtggttacgctgccgtccgcctctttcacgctgacatcaagatctgctccaccaccggccaactgcaaatctgtaatcgcgaacgggccaggaggaacctctttctgataaaccacaaaaccattctgttcaatagttaccagcgcgttactctgagcaatcccctgcacccgtggcgtaaaattttgtttgctgttaggcaacatctgcatatcacgaaacaaccgcacacctctgaagcgaacagaatcaaaaatatcgctacttgtgtacatatcacccacgcgaagcgtgccgagaagttgggcaaatccacgttccagatacagggtattgcttttccacacccctggattgttatttgttttactgaaactggcatcagaatgcagttgccaccccagtaaatttaacccgctgttaaaacgtacatatgtactcttgttattaccgctcgctttatagtcgctgtaatactgactcagataataagaggtataaaacgcattaataccccgctcccagttttccggtggaacatagccactttccagttcttccacccaggcctgcgggacactgaaatcgagacgaaaaaccccgatatcccaggtatagctcccaccctgaacaagttgctcaaatgttaaacattgcttaccgctggcgaagttatcgctattaatgcctaaccgcttgataacttctctacttaaacatgtttcttgcgggttgtctttaacaataatctcatatttcccgcgccattgcttattgacataaatatcgatgtcatactgccccggtaagggttgattatcatcaagacgaatatttgcaacctgctggtctttcattccacctatcataaaatgggtatcaaaggtttcttcagctgcataagcttcaatgccgagcaataacgctacgattgcacttgcaagtggggtcattctcaacataggcagctcctgcaattaaattttgtcactaatatagttgccatggtcatcgataatggtcagatgccagttatttgcattattacttttgacattaacactctgactttctaagggggcaatcataatagtttcataattgactttgacattattagctttgacatcgctaatcgtcacccaattagcactgtcattttttatcaccaaaccattgccactgcgatttaccagcaattttttaaatgtcgctttatttaccggagcaatacccgctggccggtaaaacaacttaattctgttttgcatcgcaaacttcagtgcattcttaccttcttgctctggactatttggtggaatatccagaacattcagataaaaaatgctttctttattagtgggcagtttattcggcataattttgatttttacttgctgcccggaatttgcccctatttttgccactggtggcgttaacatgaaaggaacctgaattttttctggtggtaaactcgtatcgccatcatcaatccacgcctgcagcaggctagaacggtttccctggttcatcaactgcaccatcacttctttattttctgccgggtaaataatgcgcgtcccgtagataacaattccggcatgtgcaggaaggaccatagaaaaaatgagtaaagataataatcctttcattttaatgcctcttaaattaaaaggccgccatgggatagcggccatgtttattacctggagaaacttacaattttatttattaatcctgcgccacacgcataaccagagaagataacacatcaccactttgcacactgttatctgtcagtttcaggtattttgctttaaacggaatagcatattgaccttccgctgttttataactctcaatgttaaaaggtgcagaaacatccaggacatcgctgttatcacctaaatagagatagtaacccacggtatcgttgctactggctatcgccttatcgttaccggttattttatcgttggtaatcaagctgagttttacaccagcaacttctttcgggcagctaatttttaacatgctgctggttacaccgactgcatcatcataggtagaatatttagctttaccttcaaagacactggttggtacagtcggcatattaatacttacactatcaccacccgcttcgaatttacacggagattctgcaatattccccttaatagttaatgttccggtatcaacgtctgcagcaaatactccagcgctcataaaaaaagaagaaaagacagcggcagcaataatactacgtttcataatatgttccttaataaaatttatttttggttgttaagagtctgtatctcttggaaacaaatttctcacatcaaaaaagttgccgcaatgtaaacacattgttttattgatttaaaacaaattaaccattgcaatataaatacaaaaaatatttaagagtattaactatttatcgcatctatcaattaatgtagatttatgtaaatggtattgttgatatcaataaaaaagccgaaatcatttatataaatgatttcggctttctaaatgcaattaaaatcaggttgccaaattaatcgtagcgatttaacacgattcgacgtttgctatcgctacctgcaacaaccacttctgtcgttacacctttgacggggctagaaaacagatgacgggtgtcaacattatacgttaactgaccacaatgctgttgaggttgaccattaaccatagccatactgcatgttgggggactgatcctgccattaatcgctaatgtggcagtctcactagagaatgcgggagaagccaatccataggcaagaaaaataattccactcagccaatacttattcattgaacgttatccctgtagtaaaggttatgcctggatagaatgagtgcataacaaactatagctgtacatccactacacagccacgaaggatgataatgaagcattgcctgtatgatcaatcgactttgtagagtttcggacgaaggtccgcagaatattcgcagtattaaataagtgttcattaatgcggcaaaaactaatacaccgcatcaatgtaacatctctgcggtgtatgaagaataaccagaatggttaataggcgttagaccgcgcggaaggaaatctcgcctggaatgacttcaccctgccagtagagctgagctgcaacgcggtcagccagctggcggtagatagcggtaaattcgctctccggacggctgataaccgttggcgtacctttatcgagatcctcacgtaaggagatgtgtaacggcatctgccccagcagctgtgtatggtatttttcagccagtttctctgcaccaccggtaccgaaaatcggttcatggtgaccacagttactgcaaatatgcacactcatgttctcgacaataccgagcaccggaacctcgactttctcgaacatcacaatgccttttttcgcatcgatcagcgcgatgtcctgcggggtggtgaccacgactgcaccggttactggaatgttttgcgccagcgtcaattgaatgtcaccggtgcctggcggcatatcaagcaccagatagtcgagatccggccacaaggtttcctgcaacatctgcattaacgccttgctcgccatcggtccacgccacaccatcgcattgtcgtcagtgaccagataaccaatactattggttgccaggccatgagacataatcggtgccatatgggtaccgtccgggctagttggacgctgattttctgcgcccaacattgttgggatacttgggccgtagatatcggcgtccagaatgccgactttcgccccttctgccgccagcgccagtgccaggtttaccgccgtggagcttttacccacgccgcctttaccggaactcaccgcgataatgttcttcacaccgttaattcccggctgattcttcacgcgtttcagagtggctatgttatggctcagtttccagtcgatagctttcgccccggtgatgcgcagcagttcggcgctacattgctcttttaactcttcgaacgcgctatgccagacaaacggcataaccagttccacatgcaacgtgtcgtccatccaggcgacatggtgcaacgctttcagcgtggtgaggttatgcttcagggttgggtgctgaaaattggccagtgtcccggcgaccattgcgcgcaaggcttctggacttttggcctgggattgttcgttcatcccgactccttttttgtatagataaaccatcagctgatagtttacctgaagaatatagagaagtacttacttaacattttcccatttggtactatctaaccccttttcactattaagaagtaatgcctactatgactcaagtcgcgaagaaaattctggtgacgtgcgcactgccgtacgctaacggcagtatccacctcggccatatgctggagcacatccaggctgatgtctgggtccgttaccagcgaatgcgcggccacgaggtcaacttcatctgcgccgacgatgcccacggtacaccgatcatgctgaaagctcagcagcttggtatcaccccggagcagatgattggcgaaatgagtcaggagcatcagactgatttcgcaggctttaacatcagctatgacaactatcacagcacgcacagcgaagagaaccgccagttgagtgaacttatctactctcgcctgaaagaaaacggttttattaaaaaccgcaccatctctcagctgtacgatccggaaaaaggcatgttcctgccggaccgttttgtgaaaggcacctgcccgaaatgtaaatccccggatcaatacggcgataactgcgaagtctgcggcgcgacctacagcccgactgaactgatcgagccgaaaagcgtggtttctggcgctacgccggtaatgcgtgattctgaacacttcttctttgatctgccctctttcagcgaaatgttgcaggcatggacccgcagcggtgcgttgcaggagcaggtggcaaataaaatgcaggagtggtttgaatctggcctgcaacagtgggatatctcccgcgacgccccttacttcggttttgaaattccgaacgcgccgggcaaatatttctacgtctggctggacgcaccgattggctacatgggttctttcaagaatctgtgcgacaagcgcggcgacagcgtaagcttcgatgaatactggaagaaagactccaccgccgagctgtaccacttcatcggtaaagatattgtttacttccacagcctgttctggcctgccatgctggaaggcagcaacttccgcaagccgtccaacctgtttgttcatggctatgtgacggtgaacggcgcaaagatgtccaagtctcgcggcacctttattaaagccagcacctggctgaatcattttgacgcagacagcctgcgttactactacactgcgaaactctctagccgcattgatgatatcgatctcaacctggaagatttcgttcagcgtgtgaatgccgatatcgttaacaaagtggttaacctggcctcccgtaatgcgggctttatcaacaagcgttttgacggcgtgctggcaagcgaactggctgacccgcagttgtacaaaaccttcactgatgccgctgaagtgattggtgaagcgtgggaaagccgtgaatttggtaaagccgtgcgcgaaatcatggcgctggctgatctggctaaccgctatgtcgatgaacaggctccgtgggtggtggcgaaacaggaaggccgcgatgccgacctgcaggcaatttgcagtatgggcatcaacctgttccgcgtgctgatgacttacctgaagccggtactgccgaaactgaccgagcgtgcagaagcattcctcaatacggaactgacctgggatggtatccagcaaccgctgctgggccacaaagtgaatccgttcaaggcgctgtataaccgcatcgatatgaggcaggttgaagcactggtggaagcctctaaagaagaagtaaaagccgctgccgcgccggtaactggcccgctggcagatgatccgattcaggaaaccatcacctttgacgacttcgctaaagttgacctgcgcgtggcgctgattgaaaacgcagagtttgttgaaggttctgacaaactgctgcgcctgacgctggatctcggcggtgaaaaacgcaatgtcttctccggtattcgttctgcttacccggatccgcaggcactgattggtcgtcacaccattatggtggctaacctggcaccacgtaaaatgcgcttcggtatctctgaaggcatggtgatggctgccggtcctggcgggaaagatattttcctgctaagcccggatgccggtgctaaaccgggtcatcaggtgaaataatcccccttcaaggcgctgcatcgacagcgccttttctttataaattcctaaagttgttttcttgcgattttgtctctctctaacccgcataaatactggtagcatctgcattcaactggataaaattacagggatgcagaatgagacactttatctatcaggacgaaaaatcacataaattcagggcagttgagcaacagggaaacgagttgcatatcagttggggaaaagttggcaccaaagggcaaagccagataaaaagtttttcagatgctgcggcagcggcaaaagcggagcttaagctgattgcggagaaggtgaagaaggggtatgtggagcaagcgaaggataattctttgcaaccttcccaaacggtaacgggctctctcaaggtagcggacttatccaccattattcaggaacaaccctctttcgtagcagaaacccgtgcgcctgacaaaaatacagatgctgttttaccgtggctggcgaaagatattgctgtcgtttttccgcccgaagttgtacacaccacgttaagtcatcgccgctttcccggagttcctgttcagcaagcagacaaattgccccaattacgtcgcttagcctgtagtgtgtcgcaacgggataataaaacagccacatttgacttcagcgcctgttctttagaatggcaaaacaccgtcgcccaggcgatcagtcagatcgacggcctgaaaacaacacagttaccatcaccagtaatggctgtactcacggcacttgaaatgaaatgcacaagatataaagtgcgtgaggatgttatggatcagatcgtccaggaaggcggtctggaatatgctactgatgtaataatacaccttcaacagattgatattgaatgggattatgcgaataatgtcattattattctgccgtctggcattgcacctagctacttggagcaatattccagatttgaatgacgcctacgtaaacatttatcactgacggaagagtctctctggcaaaaatgtgcacaaaaacttattgccgcaattccacatattccagaatggcggcaaccattaattgctttgttattacccgaaaaaccagaaattgcacatgaaattgcccagcgtctactggggcaaaaaaaattaccctcgcttgagtggttaaaaatagtggcgactgatgagcacattcttgcctcattagaaaaatatcacgaaccatatgccatttttgatgattactattgtggtgcgatatggtcagccaccgtattacaggagcaaggtgttgcagccctgccccgatttgctccctatgccgcaagtgactactgcgccgatgtgttgcgtcatatcaatcatccgttcgcattgacactgcttatacgtgtagccgggcaaactaaacgctgtcacgatcggatgacgaaagccattgctgcgttcccacatgcagcaatggcggcactgacggaacttcttgggcaaaaagaagagaacagttggcgcattatgctaatgacaatgcttatctcacaaccagcactggcagaacaggtcattccctggctctcgacacccgcagttgccgtactgaaatcatgccagcaacaactgacacagccctcaaaccatgccagcgccgatctactgccagccgtagtagtctcccctccctggctttcgaaaaagaaaaaatcgccgattccggtgctggatttagcgccattaggcattgagccaatctgttatctgacagaagaaatcagtaatcaacttttggcgaaatatatctggtattcaaaacacatcacggttagccatgaagaaagtactaccaacctgttggcaaggatgggttttcaacgacggatcgctggtacatatattaaagctcccgaagcggtagttgaggcatggctaaatgaagattattcaaccttactaagtgaatttaaggtgtttcattcacctaccgggcattattggcagttggggattttgacaacattgccgctggagaaagcagtaaaagcatggaatgcccttaccctatctccacataccgataccgaatactccatgttacattttggactcaaagggttacctgggttagtaaactcacttgcacgctatccacaagaagccttgcccatcacgaattacttcgcagcgagtgagctggctcctgccgtcgcccgtgccttcaacaaactgaaaacgctacgcgaaaacgcccgtagctggctgttgaaatacccggaacatgcccttaccggcctgctgcctgcggcgctcggcaaagccggtgaagcacaggataacgcccgcgctgccttgcgtatgcttaccgaaaacggtcatcagccattactgcaagaaatcgcccgacgttataaccagccggaagtaaccgatgcggtgaacgctctgcttgcgctcgatcccttagataatcacccgacaaaaatccccactcttccggccttttatcagccatcgctctggacgcgcccggtattaaaagcaaatgcccaatcactgccagatagcgccctcctccaccttcggtgaaatgctccgcttccctcaggaagaggctctgtatccgggattattgcaggtgaaagacgtctgttccgccgactcactggcgggatttgcctgggatctgtttaccgcctggcagaccgctggcgcgccgtcgaaagagagttgggcgttcactgcgttaggcgttctcggtaacgatgacaccgcccgcaaactgacgccattaatacgcgcctggcctggtgaatcccagcataaacgcgccaccgttgggttggatattctcgctgctatcggtagtgatatcgcccttatgcagcttaacggcatcgcccagaaactgaaattcaaagcattacaggagcgggcaaaagaaaaaattgccgacattgccgagagccgcgaactcacggtggcggagcttgaagatcgggttagcaccggatctcggtctggatgataacggttcgctgctgctggattttggcccacggcagttcaccgtcagctttgatgaaaccttaaaaccgtttgtgcgtgatgtttccggcagccgcctgaaagacctgcccaaaccgaacaaaagcgatgatgaaacgcgggcgaacgatgcggttaaccgctacaaattgctgaaaaaagatgcgcgtaccatcgccgcccagcaggtagcaaggctggaatccgccatgtgcctgcgccgccgctggtcgctggaaaacttccagctcttcctggttgagcatccgctggttcgtcacttaacccgccgtctgatttggggcgtttatagcgccgaaaaccagctactggcttgctttcgcgtagcagaagataacagctccagcaccgctgacgatgatcttttcaccctgccggaaggcgatatctctatcggcactcctcacgttctggaaatatcaccaacggatgctgccgcctttggtcagctttttgccgactacgaactgctaccaccgttccgccagctcgaccgtaacagctacgccctgacagaagccgagcgcaatgccagtgaactgacccgctgggcaggcagaaaatgcccgagtggtcgggtcatggggctggcgaataaaggctggataaagggcgaaccacaggatggaggctggatcggatggatgatcaaacctttgggtcgctggtcgttaatcatggaaatcgatgaaggctttgcggtaggcatgtcgccagccgaactcagcgctgagcagctcttaagcaagctgtggctatgggaaggcaaagcagaaagatatggctgggggagtaattcaacacaggaagcgcagttctccgtaatcgatgccatcaccgccagcgagctaattaacgatattgaagccctgtttgaataaggaaagagcatggacaaggaattaccgtggctggcggataacgcccaactggaactgaaatataaaaaaggcaaaacgccgctcagtcatcgtcgctggccgggcgaaccagtgtccgttatcactggaagtctcatccagacattgggtgatgaattgctacaaaaagctgagaagaaaaaaaacattgtctggcgttatgagaattttagtctggagtggcagtccgccatcacgcaggccatcaacttgatcggcgaacacaaacccagtatcccggcccggacaatggcggcgctagcctgtatcgcgcaaaatgacagccaacagttgctcgacgaaatcgtccaacaagaggggctggaatatgcgactgaggtggtgattgcacgccagtttattgcgcggtgttatgagagtgatcctctggtagtgacattgcagtatcaggacgaggattatggctatggttatcgcagtgaaacctataacgaattcgatctccgactgcgtaagcatctctctctggcagaggaaagctgctggcagcgttgcgccgacaaactcattgccgcactaccaggaataaacaaagttcgccgcccttttattgcgctgatcctcccggaaaaaccagaaatagccaatgagttggtaggccttgaatgcccgcgaactcattttcattctaaggagtggttaaaagttgttgctaatgaccccacagcggtgagaaaactcgaacactactggagccaggatatatttagcgatcgagaagccagctacatgagccatgaaaaccacttcggctacgcggcctgcgccgcccttttgcgcgaacaaggactggcagccattccgcgcctcgcgatgtatgcccataaagaagattgcggcagtctgctggtacaaattaaccatccgcaagtcatccgcaccttgctactggtggctgataaaaacaaacccagcctgcaacgtgtagctaaataccataaaaacttcccccatgcgacgctcgccgcactggcagaactgctggcgttaacagaaccaccagcccgccctggttatccaatcatcgaagacaaaaagctgcctgcacagcaaaaagcacgcgatgaatactggcgtacgctgttacaaacgctgatggcaagccagccacaactggcagcagaagtgatgccgtggttaagtactcaaccccagagtgtgctgaagagttatttaagcgcaccgcccaaaccggttattgatggcaccgataacagcaatctgccagaaatcctcgttagtccaccgtggcgtagtaagaaaaaaatgacagctccacgtcttgatttggcaccgctcgaattaactccgcaagtttactggcaaccaggcgaacaagagaggcttgccgccactgagcctgcccgttatttcagcacggaatctcttgcgcaacgcatggaacaaaaaagtggacgagttgtattacaggaactgggttttggggatgatgtatggctgtttctgaattatatactccccggaaaactggatgctgcacgcaatagtctctttgttcagtggcattactaccaggggcgggttgaagagatcctgaatggctggaactccccggaagcacaattagcagaacaggcgctccgcagcggtcacatagaagcgttaattaacatatgggaaaatgacaactacagtcattatcgtccggaaaagagtgtctggaacctgtatttattggcacagttgccgcgtgagatggctttgaccttctggctgcgtatcaatgagaaaaagcatctgttcgcgggtgaggactattttctcagtatcctcggattggatgcgctaccaggtctgctgttggcttttagtcatcgtccaaaagaaacatttccgttaattttaaattttggcgcaacagaactggcgctgcctgttgcccacgtctggcgacgtttcgcggcgcagcgtgatctggctcgccagtggattttacaatggccggaacatacggctagtgcacttatccctcttgtctttaccaaacccagcgataatagcgaagccgcattacttgccctgcgtttactgtacgaacagggacatggcgaattgctacaaaccgtggcaaaccgctggcagcgtacagatgtatggtctgccctggagcagttgcttaaacagggtccaatggacatttacccggcacgcattccaaaagcccctgatttctggcatccgcaaatgtggtccaggccgcgccttatcactaataatcaaactgttaccaatgacgctctggaaattatcggcgaaatgctgcgctttacccaggggggacgtttttatagcgggctggaacaactgaaaacgttctgccagccacaaacgctggcagcttttgcctgggatctcttcactgcgtggcaacaagctggtgcccccgcaaaagacaactgggcatttctggcgttaagtctctttggtgacgaaagcacggcacgggatctgacgacacagatcctcgcctggccacaagaaggcaaatctgcccgtgctgtcagcggcctgaacatccttaccctgatgaataatgatatggcgctgatacagctgcatcatataagccaacgggctaaatcccgccccttacgtgataacgcggcggaatttcttcaggtggtcgcagaaaatcgcgggctaagccaggaagagctagcggacagattagtcccaaccctgggccttgatgatccgcaggcgttgagttttgattttggtccccggcagtttaccgttcgcttcgatgaaaatctcaacccggttatctttgatcagcaaaacgttcgccagaaaagcgttccccgtttgcgcgccgatgacgatcaactgaaagcgcccgaggcactggcccgactaaaagggctaaaaaaagatgctactcaggtgagcaaaaacctgctcccgcgtcttgaaacggccctacgtaccacccgacgctggagcctggcagattttcattctctgtttgttaatcatccctttacccgtctggttacccagcgattaatatggggggtttatccggcaaatgaaccgcgttgtttactcaaagcctttcgtgtggccgcagagggggagttctgcaatgcgcaagatgagccaattgacctgcctgcggacgctctgattggcattgcccacccgttagaaatgacagcagaaatgcgcagtgaatttgcacagctttttgccgattacgaaattatgccgccttttcgccagttgagccgccgcacggtgctgctcacacctgacgagagtaccagtaacagcctgactcgctgggaaggtaaatccgctaccgttgggcaacttatgggaatgcgatacaaaggctgggagagtggctatgaggacgcatttgtctataacctgggtgagtaccggctggtccttaagtttagtcccggttttaaccactacaatgttgatagcaaagcgctaatgagcttccgttctcttcgagtgtaccgtgacaataaatccgtcacttttgccgaacttgatgtgtttgatttgagtgaggcgttaagcgcacctgacgtcattttccattaaaacacagcgggcagtgatgcaactgcccgttatcaacacgacttaccagcggggaaagcgatgatcgtgcaaaaagagctggttgctatttacgattatgaggtccctgtacctgaagatccgttttccttcagacttgagatccataaatgctctgaattatttacaggttccgtctatcgactggagcgattccggctacgtccaacatttcatcaacgtgatcgagaagatgctgacccgctaataaatgatgcgttgatttatataagagatgagtgtattgatgagcggaaattacgaggtgaaagtcctgaaactgtaatagcaatttttaatcgtgaactacagaatatattcaaccaagaaatagaataatatactctaaataattcaaattggtccgatccggcgcaacgtcccaatggcctggattataaatctcattatcttaattgcaacggggtccagccgtggttataattcgttcgttggaacacgatgttgcacaggctgtggtgttaggcctgaaaatagtaaataaaagaacctgcctcaccagcaggtttttttatttactgtgatctgctttccagatatttttcgctcaaacaactaatgcgccaaacatttattgcgcgtaaaatatcgtttatttcattaatacatttcagggatgaatatatgagtccgcagaataatcatctgcagcgtccgcctgctgctgtgttatacgccgatgaactggcaaaattaaaacaaaatgataacgcaccttgcccgcccggttggcagttaagtttgcctgcggcccgtgcttttatccttggcgacgaagcgcaaaatatcagccgtaaagtggtgattagcccctccgctgtcgaacgtatgttagtcactcttgctaccggccgcggtttgatgttggtgggggaaccgggtaccgcaaaatctcttctttctgaattactggcaaccgctattagcggcgatgccgggttaaccatccagggcggggcatctaccaccgaagatcaaatcaagtatggctggaactacgccctgcttatcaatcatggtccgagtacggaagcgctggtccctgccccgctttatcagggaatgcgcgacggcaaaatcgtccgtttcgaagagataacgcgtacaccgctggaagtgcaggactgtctgttaggtatgctttctgacagggtgatgacggggccggaactcactggtgaagccagtcagctctatgcgcgagaaggctttaatattattgccactgccaatacccgcgatcgcggcgtcaatgaaatgagtgctgcgctaaagcgtcgcttcgattttgaaacggtttttccgattatggatttcgcccaggagttggaactggtcgccagtgctagcgcgcgtttgctggcccatagcggtattccgcataaagtgcctgacgcggtactggaattactggtccgcaccttccgcgatctgcgtgccaacggcgaaaagaaaacgagtatggatacactgacagcgattatgtccaccgctgaagccgtgaacgtggcccatgctgtgggcgtccgcgcctggtttttagcgaatcgcgcgggggagcctgccgacctggtggaatgtattgccggaaccatcgtcaaagataacgaagaagatcgcgcgcgtctgcgccgttacttcgaacagcgtgtcgccacacataaagaagctcactggcaggcttattatcaagcccgccaccgcctgccgtgaggaaagatgcatgagcgagccgttaattgtcggcatccggcatcatagtccggcctgcgcccggctggtgaaaagcttaatcgaaagccagcggccacgatacgtgttgattgaaggcccggctgattttaatgaccgggtagacgaactgtttttagcccaccagcttccggtagctatttacagttattgccagtatcaggacggtgcagcccccgggcgtggtgcctggacgccatttgctgaatttagcccggagtggcaggcgctacaagccgcacgtcgcattcaggcacaaacttacttcatcgatttgccttgctgggcgcagagtgaagaagaggacgatagccctgatacgcaagatgaaagccaggccttactgctgcgtgccacccgcatggataacagcgataccctgtgggatcacttgttcgaagatgaaagccagcaaactgcattaccctctgcgctggcgcactattttgcccaactgcggggcgacgcctccggcgatgcgctcaatcgtcagcgcgaagcctttatggcccgctggattggatgggcgatgcagcaaaataatggcgacgtgttagttgtctgcggtggctggcacgctccggcactggcaaagatgtggcgcgaatgccctcagaaaattaacaagccagaattgcccagcctggcagatgccgttacaggttgttatctcacaccctacagtgaaaagcgccttgatgtgctggcaggataccttagtggaatgcctgccccggtatggcaaaactggtgctggcagtggggcttgcagaaggccggtgaacaactgctaaaaactatccttacccgtttgcgccagcacaaattgcccgcttctaccgcggatatggctgccgctcatctgcatgcgatggcgctggcacagttgcgcggtcatacactaccgttacgcactgactggctggatgccatagcaggcagcctgattaaagaagccctgaacgcgccgttgccgtggagctatcgcggcgttattcatcccgataccgatccgattctgctaacgttgatagacacattagcgggtgacggattcggtaaacttgccccttctacgccacaaccgcctctgccaaaagatgtcacctgcgaactggaacgtaccgcaatctcccttccggcggagcttaccttaaatcgctttacccccgatgggctggcgcaaagtcaggtgttacatcggctggcaatactggagatccctgggattgtacgccagcagggaagtacactgacacttgcaggcaacggtgaagaacgctggaaattaacccgcccgcttagccagcatgcggcattgattgaggccgcctgttttggtgccacactccaggaagccgcacgcaataaattagaagccgatatgctggacgcgggcggaatcggcagtatcaccacatgtcttagccaggcggcgttagcgggtctggcgtccttcagtcaacaattactggagcaactcacactattaatcgcccaggaaaatcaatttgccgaaatgggccaggcgctggaagtgctttatgccttatggcggctggatgaaattagcggtatgcaaggcgcgcagatattacaaacgacgttatgcgcgactatcgatcgcacgctgtggctgtgtgaatctaacggcagaccggatgaaaaggagtttcacgctcacctgcatagctggcaagcgctttgccatattctgcgcgatctacatagcggcgttaatttacccggcgtttctctttctgcggcggtagccttactggagcgacgcagtcaggcaattcatgccccggcgctggatcgcggcgcggctcttggcgcactaatgcgtctggaacatcccaacgccagtgccgaagcggcgctgacgatgctggcgcagttatccccggcacaatctggtgaggcgctgcacggtttgctggcgctggcccgccatcaactggcctgtcagccggcatttatcgccggtttcagcagtcatttaaatcaactgagtgaagccgattttattaacgccctgcccgatttacgcgcggcgatggcctggctaccaccacgagaacgcgggacgctggcgcatcaggtgcttgagcattatcaactggcgcaacttcccgttagcgcgctgcaaatgccgttgcattgtccaccacaggccattgcacatcatcaacaactcgaacagcaggcactggcaagcctgcaaaactggggagttttccatgtctgaactgaacgatcttctgaccacccgtgagctacaacgctggcgattaattcttggcgaagcggcagaaacgacgctttgtgggctggatgacaacgcccggcagatagaccacgcgctggagtggctgtatgggcgcgatcctgaacggctccagcgtggtgaacgttccggtggattaggtggcagtaatctcaccacccctgagtggatcaacagtattcacacgctgtttccgcagcaggtgattgagcggctggaaagcgatgccgtgctgcgctacggcattgaagatgtggtgacgaatctcgacgtgctggaacgtatgcagccttctgaaagcctgctacgcgctgttttgcacaccaaacatctgatgaaccccgaagtactggctgccgcccgccggatagtgtgccaggttgttgaagaaattatggctcgactggcaaaggaagttcgtcaggctttttctggtgtccgcgatcgccgtcgccgtagttttattccactggcgcgaaactttgatttcaaaagtactctgcgcgccaacctgcaacactggcacccgcaacacggcaagttgtatatcgaatccccccgctttaacagccgcattaaacgccaaagcgaacaatggcaactggtcttactggttgatcaaagcggaagcatggtcgatagcgtgatccactctgcggtgatggcggcctgtttgtggcagttacccggcattcgtacccatctggtggcgtttgacacaagcgtcgttgatctcacggcagacgttgccgatccggtagagttattaatgaaagtacagttgggcggcgggaccaatatcgccagtgccgtggagtatggtcggcaacttattgaacaaccagcgaaaagcgtcattatcctcgtgagcgatttttacgaagggggtagtagtagtttactgacgcatcaggtgaaaaagtgtgttcagagcggcatcaaagtgctgggactggcagcgctcgatagcaccgcaacaccttgctatgaccgcgatacggcccaggcgctggttaatgtcggcgcacaaatagccgccatgacgccgggcgagctggcaagttggcttgcggagaatcttcagagttgacataacttgcggagaatcttcagtcatgaatagtctacgtccggaattattagaactgacaccgcaggccctgacggcgttaagcaatgccggttttgttaagcgcagtcttaaggaactggaaaatggcaacgtcccggagatcagccatgagaacgacgctttaatcgccaccttcagtgacggtgtccgtacccagctggcgaacggccaggcactgaaagaggctcagtgcagttgcggggccaacggtatgtgccgtcatcgcgtgatgctggtgttaagttatcaacgactttgtgccaccactcagtctacggaaaaagaagaagagtgggatccggcaatctggctggaagaactggctacccttcccgatgctacccgcaaacgcgcacaggcgctggtcgctaaaggcatcaccattgagttgttctgtgcgccgggtgaaattccctctgcccgcttaccgatgagcgatgtgcgtttttattcccgcagcagtattcgtttcgcccgttgtgattgtattgaaggcacactttgcgaacatgtcgtactggcggtacaggccttcgtcgaggccaaagcgcagcaagcagaatttaaccatttaatctggcagatgcgcagcgaacacgtcacaagttctgacgatccgtttgccagcgaagaaggcaacgcgtgtcgtcaatatgttcagcaattaagccagacattatggcttggcggcatcagccagccgctcatccattacgaggcagcattcaaccgcgcattgcaggcggcagagacctgcaactggcgctgggtgagtgaaagcctacggcaactgcgcgccagcgttgatgccttccacgcccgcgccagccactataatgccggagaatgcttacatcagcttgcggcattaaacagtcgattaaattgcgcacaagagatggcccggcgcgacagtattggtgaagttcctcctgtgccgtggcgcacggtcgttggctctggcattgccggagaagcaaagcttgatcatctgcggctggtgtctttaggtatgcgttgctggcaggatattgagcattatggtttacgcatctggtttaccgatcccgacaccggcagtattttgcaccttagccgcagttggccgcgaagtgaacaggaaaacagtccggcagctacgcgtcggctgtttagttttcaggctggcgcactggcgggcgggcaaattgttagtcaagcagcaaaacgcagtgccgatggcgagctgctgttagctacccgcaaccgcttaagcagcgttgtgccgctgagccctgatgcctggcaaatgttgagcgcgccgttacgccagccgggcattgtggctttgcgggaatatttacgccagcgtccccccgcctgcatacggcctcttaatcaggtcgataacttatttattctgccggtcgctgagtgtattagcctcggttgggacagcagccgccagacgctggatgcgcaggtcattagcggcgaaggggaagataatgtgctgacgttaagtttaccagccagtgccagcgcaccttatgccgttgaacgcatggcggcgcttttgcaacaaacagacgaccccgtgtgtctggtttctggctttgtcagttttgttgaagggcaattgacactggaaccacgggtgatgatgacaaaaacccgtgcctgggcgctggacgcagaaactacgcctgtggcaccgctaccttctgccagcgttttgcctgtgccgtctactgctcatcagttgctgatacgctgccaggcgttacttattcaactgctccataacggctggcgctatcaggaacagagtgctattggtcaggcataattgctggcgaatgacctcaccgcggtgggtttttatcggctggcacatgtgttgggacaatttcgtaatacagaaagcgaggcacgggtagaagcaatgaataacggtgttttgctttgcgaacaattattccccatgcttcagcaacaaggatgaaatagtgctttttactaagagttctactccagttccggactgctcacgccacggtattaggcatatcctatatagcccctggtgagagtcaccagttccttgattaaataaaatggagttttacatgaaggctttcaataagctgttttccctcgttgttgcatctgttctggttttctctcttgctggctgcggtgacaaagaagaaagcaagaaattcagcgccaatctgaacggcactgaaattgccattacctatgtctacaaaggtgacaaggtgcttaagcaatcttctgaaaccaaaattcaatttgcctccattggtgcaaccaccaaagaagatgctgccaagacacttgagccgttaagcgccaaatacaaaaacatcgcgggtgttgaagaaaaattaacctataccgatacctacgcgcaggaaaacgtgactatcgatatggaaaaagtggattttaaagccctgcagggtattagtggaatcaacgtttctgctgaagatgccaaaaaaggtatcactatggcgcaaatggaactggtgatgaaagccgctggttttaaagaagtgaaataatcggttggcggtcatgctctaaacatgaccgccaattttttagccttttttcacatgctggcgcgctgccagtccacgcagaaaataacgtaaaaattgatcgccgcattcgcggaagtttttatgatccggtgcgcgcatcatcgctgtaatttccggcatgctaacgcggaactgctgttcggtgaggatagccagaatgtcatcggttttcaggctaaacgcgatgcgtaattttttcagcacgatgttgttattaatgcgacgttccggctccagtgccggagcagactcatccttgccgcgtttttcataaatcaggccattgaggaaactgctcaaaacaatgtccggacaacgctgaaaaccctcttcgtcttctttacgtagccagacggcgatctgttccgcggtggcttcgacattacccagcgccagaatacgcaccaggtcattattattggctttcaaaatgtagcgcacgctgcgcagaatatcgttacttagcatgaggccttcaggtgttgatgaggcaaaaagccattttagcagtcttttacaggccaatcgcctcttttaagcttttcagataacggcggctgaccggcacggttaagccattacgcaaaatcaactcggcctggccgttatcttccagacgaatctcctgtaaatgcgcgaggttaaccagatactgacgatggcagcgcagtagtggtgtacgactttccagggtacgtaatgtcaattcggtaaagccctctttcccttcgtggctggtaacgtagacaccgctcatccgactgctgacaaatgccacatctttcatttgcagcaaataaatccgactatgccccgtacaagggataaatttcagcgcctgttgattttccggtaacaggctaacatcctgcttgctgcgctcctgacgcaatcgcgccagcgttttctccagtcgcgcttcatcaattggcttcagcagataatcaaaggcatgttcttcaaaggctttaattgcgtattcgtcaaacgcagtgagaaaaacaatatacgggcgatgttccgggtcaagcatccccaccatttccagaccactgatgcgcggcatctggatatcgagaaacagcacatccgggcgcagtttatgcaccgcgccgatcccttccacggcgttactacactctccaacgatttcaatatcgctctgctcctgcaaaaatacacgcaggttctcccgtgctaacggttcatcatcgacaattaagactttaatcatgcctcgtccctccatggtagtcgtaacgttattcgggtgtaactatcaggctcacaggcgacgcttattccatagtcatcgccaaaccgttcacgtaaacgcttatccaccagattcatccccagcccactggcattggttaccggttgatacaaaccggcattgtcttcgatctccagcatcaaatgttgcccctcacgtcgggcgctgattgccactcgccctgtatccagcagttgacttgtcccatgtttaatggcgttttccactatcggttgcagggtaaacgcgggcaattgctgctgggataattcttgcggaatagcaatgttgacctgcaaccggctctggaagcgcgccttttcaatttgcagataagcattcacatgttcaatttcgtcggcgagagtaacaaactcgctaggccgctttaagtttttgcggaaaaaagtggaaagatactgcaccagctggctggcctgttcgctgtcgcggcggatcaccgctttaatggtgttaagcgcattaaacaaaaaatggggattcacctgggcgtgaagcagtttgatctcactctgggtgagcatcgctttttgccgctcatattgcccggcaaggatctgcgcgctaagcaattgcgcaatcccctcacccaacgtgcggttgatgctactgaataaacggtttttggcttcatacaatttgatggtgcccatcacccgctgattttcaccacgcaacggaattaccagcgtgctccccagtttgcattgcggatgcaaagagcaacggtaaggtacttcgttgccatcagcgtagaccacttcaccggtttcaatcgcttttaaagtataagtactagaaatcggtttgccgggtaaatggtggtcgtcaccaattccggtaaaggccagcaatttctctcgatcggtaatcgcgactgcaccaatatccagttcctgatacagcacctgagccactttcatgctgttcacttcgttaaacccctggcgcaaaatgccttccgtgctggctgccactttcagcgcagtggcagaaaaagcgctagtgtatttttcaaacatcgcgcgtttatcgagcaatatacgcataaacagcgccgcgccgacggtattggtgaccatcattggcgcagcaatattactcaccagacgcaccgcatcttcataaggtcgggcgatcgcaaggatgatcagcatttgcaccatttcagcgacgaacgtgacggcaccggcggtaatggggttaaagactttatcagtgcgcccgcggcggatcaggatgctgtgtaccaggccaccgagtaatccttcaacgatggtgctgatcatgcaacttaacgcggtcatgccccccatgctatatcgatgtaagccgccggtcagcccaaccagcccaccgacgaccggaccgccgagtaagccgcccattaccgcgcctatcgcacgggtattggcaatagaatcgtcaatgtgcaacccaaaccaggtgcccatgatgcagaagatggaaaagacgatgtagcagagaaatttatgcggcagacgaaccgtgacctgcattaacggtatgaataatggcgttttactcattaaccatgcaatgactaaaaaaacgcacatctgctgaagcagcagcaacaccagattaaaatcgtacatacccgcaaaccacacttccctttaaaacgcgtaacatacattgcctgcgtttaactttctttgaactcttgcagaaaaatgagaattcgtgagtacgatcactcaaaatcgcctggcaaaaataaaatcaccctatagatgcacaaaaaacgggcaaaactacctggttcgcaaaactgcgtctaaagttaaaccgggacctcgcgagcaagggtgagacgatggcgctttacacaattggtgaagtggcgttgctttgtgatattaatcctgtcacgttacgcgcgtggcagaggcgttacggattgctgaaaccgcaacggacagacggcggtcatcggctgttcaacgatgccgatattgaccggatccgcgagatcaaacgctggatcgacaacggcgtgcaggtcagcaaagttaaaatgctgctcagtaatgaaaatgttgatgtgcagaacggctggcgcgatcagcaagaaacattactgacttacctgcaaagcggcaatctacatagcctgcgaacgtggatcaaagagcgcggtcaggattaccccgcccagacactcaccacacatctgtttattcctctgcgccgacggcttcagtgccaacaaccgactctccaggcgctgctggcgatcctcgacggcgtactgatcaactacatcgccatttgtctggctagcgcacgtaaaaaacagggtaaagatgcgctggtggttggctggaatattcaggataccacccgtctgtggctggagggctggattgccagtcaacaaggatggcgcattgatgtcctcgcccacagcctcaatcaactacgccctgaactattcgaaggccgtacattgctggtgtggtgcggtgaaaatcgaacctccgcccaacagcagcaactcaccagttggcaagaacaaggccatgatattttcccactcggcatttaatgattcgttaacaaatgcgctttactgtacaatcctttcgttaacataaggagtgcattatgcgcatagctaaaattggggtcatcgccctgttcctgtttatggcgttaggcggaattggtggcgtcatgctcgcaggttatacctttattttgcgtgctggctaagcgcctgcaccagcctttcaaacaggcggtctgcgatgatcgccgccagtgccaccagtaacgccccctggatcacatacgcggtattaaatccgctaagcccgatgatgatgggcgtacccagcgtgctggcccctaccgtactggcgatcgtcgccgtaccaatgttgataatcacgctagttcgcacgcccgccagaatcaccggagccgccagcggtagctcgaccttacgcactcgctgaccacgactcattcccatacctttcgcaacttctgtcacgctggcatcaatcgctcccagcccggcaagtgtcgcctgcaggacgggcagcacaccgtaaaggatcaaggcgataatcgctggttgcagaccaaagccgatcaccggaacggcgatcgccagcactgcgacgggcggaaaagtctgtccaacggcggcaatagtttccaccagtgggcgaaattccgcgccccacgggcgagtgacagcaattccggcaccagtgccaatgatcaccgcaaacaaactgctaattcccaccagccagaaatgagccagtgccagagctgcaaaactttcttgctgataaacgggtcgtggcagttgtgggaacaaggcagcaaacagcggctggctgtaaggcagccagaaaatcagcgccacaaacagagcaatgagccagaacagcggatcgcgcaacatcttcatacgcttacgcctccaccagcagatcctgaaaatgcagcgtgccgcaaggctggccctgcatgttcaccaccggcagcacctcgcatccccgcgcaacaaacagagagagcgcatcgcgtagcgtcatctcttctgccagtgcctcaccatctgctcgttcttcgcgacgcacgtaatccgccacactacgtaagctaagcaggcgcacacccagttcactacgtccaaaaaactggcggacaaaatcattcgccggacgagtcagcatcgtcagcggattgccctgctgcactacttcaccgtgatccatcaataccagatgttctgccagccgtagcgcctcatcaatatcatgagtgaccagcacaatggtacgccccagcaaacggtgaatgcgcgtcatctcttgttgcaacgcgccgcgcgttaccgggtccagtgcgccaaaaggttcatccattagtaagacttgcggatcggcagccagtgcacgcgccactcccacacgttgctgctgaccaccggaaagctgatgcggataacgctcacgcaaattactctccagccccagtagcgccattaattcgtcgatacgatcgtcaatccgcgcccggctccatttttgtaattgcggcacggtagcgatgttttgcgccacgctccagtgggggaacaggccaatagattgaatggcatagcccatccggcggcgcaactccagtactggcaggctgcgaatttcttctccggcaaagcggatctctccgctgtcatgctccaccaggcggttaatcattttcagggtggtggatttgccggagccagatgtgccaatcagcacgctaaaactcccttcctgaaaattgagattgagatcgttaacggctttttgtgcgccgaacagtttgctgacatggctaaattcaatcattacgtttcaccttcagcagtgcgataagcaaatcgaacagcgcgtcggtaagcaccgccagaacaattaccgggatcacccccagcaacactaaatcaatggcgctgcttagcagcccctggaaaaccagcgcaccaaaaccgcctgcgccgattaacgccgcaatcaccgccatacctacagtttgcaccatcaccacccgcaggctgcgcagaaataccggtaacgccagcggtaactgaacatgcaggaaacgctgcgccccgctcatccccatcgctctggcgctttccagcacatcgcgcgggatctggttcaaaccgactaccacgccgcgcaccagcggcagcaaggcatagagcaccagcgcaatcagtgcgggtgtcattccggttcctgctatgccgagcgtccccagccacggaaaggccgtaaccagcgcggcaagcggcgcaatcaacaggccaaagagcgccacgctaggcacggtctgaatcacattgagcagagaaaaaattgccccctgccgagcagtggaaaagtagcaccagatgcccaacggcacaccaatcactaacgcaggcagcaccgcaccaaacagcaacgtcagatgttgtgccagcgcgtcgtcaaacacatcctgacggttggcgtattctttcattagactgagatcgttaagcgtgccggagtacagcaaccacagcggaataatggcaatctgcatatgcaacaaccagcgccacagcggatgcgtggagattcggcggatggcatcgctacaggccagcaatgccagcgccgcagccagccagaaaccactgccgaggctggtacgcgccagcgcactgccattttgcgccagttgggtcgccgcctttccagctccccacaccagcaatacgaagacgaattgcgccagaatgagtgcacaaatgctgccttttttaccgggaataaaacaggccgtcagccaggcgcaaccaacgcccaccagcatccagatcgtttgcggccacagctgccagagatgacgcccctcaccgctaactaaacgattaggcgcgtaactgataaacggcagcgccgctgcgattgccgtcagcaacagcagcagcgccagaacaggattaatacggaaataagtcacgggaaattacttcgtccaccctttttgtttcaggtagtcggcagccacttttttggcatccagtccttccacagcaatgctggcattcagttgctgcaatgtttttgcatcgaggctggcgaagactggctgtagccactgtgccatttgcggatactccctcaacacgctctcacgcaccactggtgcaggcgcgtagataggttgcacaccttgcggatcgcttaaggtttgcagccccagcgccgctaccgggccgtcagtgccgtaagccattgcagcattaacgccagaggtttgctgggcagcggctttgatcgtcaccgccgtgtcgccaccagccagactcagcaactgatcctgaccgagcttaaagccataggctttttcaaacgcgggtaacgcatcggcgcgttcgataaactctgcgctggctgccagtttgaaggtgccgccctcttgcagataacgactcaggtcggcaaggctagtgagtttatttttctctgccacatcctgacgcacggcgatagtccaggtgttatttgcaggcgcgggcgtcagccagattaacttgttgtgctcgctatcgagctttttgactttctcgtaaccttgctgcgcgtttttccacgctgcatcgttttcatctttaaagaagaaagcgccattgccggtatattccggatagatatccagttcaccggaagtaatcgccccgcgcaccacaggagtcgttccgagttgcactttattcaccgtcggtacgccgtggctttccagcacctgcaaaatgatattgccgagtagcgcaccttcggtatcgattttactaccgactttaacgggggaagccgcctgtagcggcaggctcacggctgccaacataaccagactacctgcccagagctttaagagtggcatgatgctttcctcattcttttactgttgttttcagcgaattaagagaaaagcatagttgataatggcggggttagcttgagcggaaggattcagttgcagaatcagataaatacttaagaggcatattcggtccggcgtttcctgccggatgcggcgcgagcgccttatccggcctacaaagggcgcaaacgtcgcgcccttactaaagcattacagcaactcaaactcgcctttcttaacgcgtgcggaatcagtgccgataaagacattgaacttgccaggctcggcgtcatatttcatctgttgattccagaacttcagcgcctcaatatcgatcgggaagctgacagtctgagtttcgcccggtttcagggtgattttctcaaagcctttcagctgtttcacagggcgactcatggaagccgtcacatcctgcaagtacatctgcactaccgtggcaccctcgcgcttaccggtgttcgtcacctgcacgctggcagtcactttgccgtcacgcttcatggtcggcgcagaaagtttcacatcagagacggtgaaagtggtgtagctcagcccatagccgaacggatacaacgccccgttagcttcatcaaaataacggctagtgtatttgttcggcttgtcggcattatacgggcgaccggtattcagatggctgtagtacaccgggatctgcccgacagaacgcgggaaggacattggcagcttgccggacgggttgtaatcgccaaacaatacatcggcaattgcattaccgccttcagtccccgcaaaccaggtttccagaatcgcatcagcctgctgatcttctttcaccagcgccagcggacgcccgttcatcagcaccagcaccagcggtttaccggtggctttcagcgccgcaatcaagtcacgttggctttgcggaatagtgatatcggtccggctggaggcttcgtgcgccatcccctgtgcttcaccgactacagccaccaccacatcagattgtttcgccgtctgcaccgcttcatcaatcatctcttgcgggctacgcggatcgactttgaccgcttcttcatactgattcaggaaatcgataatgcctttgtcactggtaacgttcgcccctttggcatacagcactttaccgttttcaccgacggcatttttaatcccggtcagtacggtcacggattgatcggcaacaccggctgcggaccagctgcccatcacgtcacgtttactgtccgccagtggcccaaccaccgcaatggtggcgctttttttcagcggtaacgtttcgagacggtttttcagcaacaccaagctttcgcgcgccacttcacgcgcttctttacggtgcaggcggctttcgtcattggtatccaccgggtcagactctttcggccccaaatggctgtatgggtcgttaaacaaccccatatcatatttaacgttcagtacatggcgggcagcatcgtccagctctgccatcgtcactttgccggatttaatcaacccaggcagatacttgctgtagtactcgtcgctcatgctcatgttgattccggatttcagcgccacgcgcaccgcatcttccgggtctgccgccgtgccatgtttaatcagctctttgattgcaccgtgatcggaaacggtgatgcctttaaagccccactggtcgcgcagaacatctttcagcagccaggaatcggaggtggctggcgtgccgttcaggctgttcagcgccaccatcaccgcgccgctgcctgcgtccagccccgctttgtacggcggcatataatcattaaacaggcgctgcggactcatatcgacggtgttgtactctttaccgccttctaccgcgccgtatgcggcaaagtgtttgacgctggtcatcacgctgtagcgatctgccgggcttttaccctgcatcgcttccaccatggttttacccattgtactggtgagatacgtatcttcgccaaaaccttcggaagcacgtccccagcgcggatcgcggctgacatcgaccatcggtgcccaggtcatattcaggccatcatctgccgcttcataagcagagacacgtccgaccgttttcactgcatcgaggttaaaagagctggccagaccgaggctaatcgggaacaccgtgcgctgaccgtgcagcacgtcgtaagcaaagaaaagaggaattttcaggcggcttaattccatcacctgatcctgcatggcgcggatatcctgacgggttacggtgttgaaaatcgccccaacctgaccgtctttgatcatctcgcggatcgcctctttcgggttatccgggccgacgctgattaagcgcagctgaccaattttctcatcaactgtcattttcttaagcagttcggtgacgaacgcatcccgcgcttcgggcgttaatggatggttgccgaataaatcatccgccagtgctggctgcagggccagactcaccgcgattcctacactacatagccatttcatatggatttttcttcctttgttgcccgacgtggcagcgaaaatggtgcaaaaaccgtagtttgccataagcatgatggagagagaaaaagaatgctcagtttattgtctgaattttcaaaatattcactcgctgaattgttatacaaggcgctattctagtttgtgatattttttcgccaccacaaggagtggaaaatgtcttccatgacaacaactgataataaagcctttttgaatgaacttgctcgtctggtgggttctagtcacctgctcaccgatcccgcaaaaacggcccgctatcgcaagggcttccgttctggtcagggcgacgcgctggctgtcgttttccctggcagtctactagaattgtggcgggtgctgaaagcctgcgtcaccgccgacaaaattattctgatgcaggccgccaatacaggcctgaccgaaggaagcacgccaaacggtaacgattatgatcgcgatgtcgttatcatcagcaccctgcgtctcgacaagctgcacgttcttggcaagggcgaacaggtgctggcctatccgggcaccacgctctatagcctggaaaaagccctcaaaccgctgggacgcgaaccgcacagtgtgattggaagtagctgtataggcgcaagcgtcatcggcggtatttgtaacaactccggcggcagcctggtgcaacgtggcccggcgtataccgaaatgagcttattcgcgcgtataaatgaagacggcaaactgacgctggtgaaccatctggggattgatctgggcgaaacgccggagcagatccttagcaagctggatgatgatcgcatcaaagatgacgatgtgcgtcacgatggtcgtcacgcccacgattatgactatgtccaccgcgttcgtgatattgaagccgacacgcccgcacgttataacgccgatcctgatcggttatttgaatcttctggttgcgccgggaagctggcggtctttgcagtacgtcttgataccttcgaagcggaaaaaaatcagcaggtgttttatatcggcaccaaccagccggaagtgctgaccgaaatccgccgtcatattctggctaacttcgaaaatctgccggttgccggggaatatatgcaccgggatatctacgatattgcggaaaaatacggcaaagacaccttcctgatgattgataagttaggcaccgacaagatgccgttcttctttaatctcaagggacgcaccgatgcgatgctggagaaagtgaaattcttccgtccgcattttactgaccgtgcgatgcaaaaattcggtcacctgttccccagccatttaccgccgcgcatgaaaaactggcgcgataaatacgagcatcatctgctgttaaaaatggcgggcgatggcgtgggcgaagccaaaagctggctggtggattatttcaaacaggccgaaggcgatttctttgtctgtacgccggaggaaggcagcaaagcgtttttacaccgtttcgccgctgcgggcgcagcaattcgttatcaggcggtgcattccgatgaagtcgaagacattctggcgttggatatcgctctgcggcgtaacgacaccgagtggtatgagcatttaccgccggagatcgacagccagctggtgcacaagctctattacggccattttatgtgctatgtcttccatcaggattacatagtgaaaaaaggcgtggatgtgcatgcgttaaaagaacagatgctggaactgctacagcagcgcggcgcgcagtaccctgccgagcataacgtcggtcatttgtataaagcaccggagacgttgcagaagttctatcgcgagaacgatccgaccaacagcatgaatccggggatcggtaaaaccagtaaacggaaaaactggcaggaagtggagtaaaaattacggatggcagagtatcgccatccgaattcacttaatcgttctgtgccgtctgccccgccgccgccatttgggcggctttttgttttttatagctcaacgctgctgccggcacaggcatcactttaccggtttcaatccaggtacgcaggcggctggcatcggcaaaatgggtatatttgccaaacgcgtccatcactaccagcgccaccggtttattattgataaccgtacgcatcaccagacaatggcccgccgcattggtaaagccggttttggttaactgaatattccagttatcgcgatacaccagatgattagtattgcggaacggcagcgtatacgtcggattagagaaggttgccatatcttcccgggtagtacttaactgcccgatcaacggatattgtttgctggcaatgagcagtttggttaagtcacgggcagtactaacgttatgcacgctcaatccggtaggttcaacaaagcgcgtgttgttcattccgaggcttttcgctttcgcattcattgccttaataaaggctttgtaaccaccgggataatggtgcgcaaggcttgccgccgcgcggttttcactagacatcagcgccagcaacagcatatctttacggctgatttcgctattcagtcgtacgcggctatagacccctttcatctccggcgtctggctgatatccacttttagtttttcatccagcggcagtcgtgcatccagcacaaccatcgcggtcattaatttgctgatagacgcaatcggacgcaccagatccgggtggttgctatagatcactttgttggtattcagatcaacaatcatcgcgctaccggaggcaatttccggttgactagcggtggtagcggctgccgttttcgcaacggcctgcggtgcaaaaggcacagccagcatcagggccaggctaaataaagaaactcgaaatttcggcatgatgagcattcagatagtggttcacgcgcacgggttgcgcaccgccggagtaaggatttactgaggctagcgacgccatcataacgagcaaaaagtgcgatcgtcaaaggagaatcgtgaggaaatgctgcattgctgacatttacgccagcaatgcaacgtcaaagaactttttagaacaaacgataaccgtagccccatagtataacggttagggcgagcagcacttccagtaccagcacgccaatcgccagcgtgctactagagaagctaaggccttcctctttgttgatattcaggaagctcggaataccaaggtaaagcaggtagccggtgtaaaacagcgccaccgtgccgaccagcgcacacaaccagaccagtggataaagcgccaccagaccgcttaaaaacagcggagttgcaacgtagcccgcgaagaccatgcagtgcgcaagactcggacgctgcggataattacgcgccatccaccagatgacccgccccatcaccgcgaccccagccagcataacgccgtaaaacaagacagccagcgccagtccggtaaaccaggataacttcaggatagtgccatcgccaaaattccagccaatctgtgtagtgccaatgaaggcgcaaatcaccggaatcgccgccatcagcaaaacgtggtgggtgtaatggtgagaaatcgtttcgttttcgcgattaatcacctgcatttcacgatcgggatgggaaaacagtccccagacatggctcataccgcccccttgttgtgagttcatgaacctgacagttcaagtataagtcagcttgtgattattttttgttcgcccatgtaattttcactgtctgatgaacgtcctttttcagcgtgaatgattcacagggtgtatgcttactggcaaccaaagggagacagactggcctatggatctcaatacacttatcagtcaatatggttatgccgcgctggtgatcggtagcctggcggaaggtgaaaccgtgactttgctgggaggcgttgcggcgcatcaggggctattaaagttcccgctggtggtactttctgtggcgcttggcggcatgattggcgaccaggtgctctatctgtgcgggcggcggtttggcggcaagctgttacgccgtttcagcaaacatcaggataaaattgagcgggcgcagaaacttatccaacgccatccgtatctgtttgtcattggtacgcgctttatgtatggctttcgggtgattggcccgacgctgattggtgccagccagctgccgccgaaaatctttctgccgctgaatattctcggcgcatttgcctgggcgttgatttttaccactattggttacgctggtggtcaggtgattgcgccgtggttgcacaatctcgaccagcatttgaagcactgggtctggttgattctggtcgtggttctggtggtgggcgtgcgctggtggctgaaacgacgcgggaagaaaaagccggatcatcaggcgtaaaaccattgccctggataaggcgttcgcgccgcatccgacatccggagtaccatgcctgatacgacgcttgtgcgtcttttcatgccgaccaaaatattacccaatgaaatatccacgcacctcactgcgttattctgggttgaactgtggattcgccaacataaagccgccatccactatcaagctctgcccggtggtgtaatttgcgccctcgctacaaagccacaccaccaggctggcaatctcatgcgttgcgccaaaacgccgcaagggaatgctaggctccgcgtcgggcttcacgtcgctgtcatccatgccattcattggcgtggcgatcgccccaggcgcgactgcgttcaccaaaatcttatgcctgaccagctccagcgccatcgctttggttaacccaccgagcgcatgtttagcggctgtgtaggcgctggcatccggcagcggcgtatgttcatgtacgctcgtaatgttgatgatgcgaccgccctgcccttgtttcaccatctgacgagccgcaatttggctgcataagaatgcaccatcgacatcaacggtaaaaatcttgcgccactcatcaaaagccatatcaagaaacggcgctttggtcattgcacccgcattattcaccagcacatcaatgcgccccagccgttgaatgagtttctccagcgccagtgccccttctggtagattgccgagatccagctgcacgatctccgcacgtacgccgtggctaactacctcacgcgcggtatcttttgccccttcttcatcactgtgccaggtaataccaatatcaaacccctgctgcgccagtaataacgcgcactctttgccgatcccgctatcggaggcggtaataatcgcaacctgtgccatcgagttctccacttaacgctgaataaacgttaagtatagaaggcgcatatcatcagcgtttgtaccccccgcccaacgcaccagtgagttgaatggaggcatccagccactgcccttgcaataacaggccattggcccgctcacgcagcgcggggattctggcttcgctgacgcgggaaccagcaatgatgcccgcgttaaagcgcgcctgcgcaagacctaccacacgcaaggcatcgcgctcaatttgcgcctgatgctggtttttctccgccagtgtctgaacctgactggctgcccgcgccacgtcattcaccgcttcaaccaccgctttgttgtagctggcgatagacaagttgctttcggcttttgcgatatcgagattggcgttaagacgaccactatcgaaaatgggtagcgtcaggcctgccgtaacgcccatttgctgcgcggaatgacggaacagatcgcttaagtgcaacgcatcctgttgcaggaaggccatcaggttgatgtcaggataaaatgccgcttttgccgcatcaatggtgcttaggctactctcaacgtaccagtgcgccgcctgcaaatctgcccgccgggccagtaaggagtaccccagttcatcaggaagctggcttgccactttcggcaacgcgaccggtttaagcttcaaactctttgtctggttatttgtaagtgcgcttaaccgtgcctcaataattttcattttccccgcgacatcgttgagctgctgccgggttttgctggcattaatatcggtttccacaccttcaacactagaagtaatcccgttctgatatagctggcgatcggtcgcgataatggtgttctgctctttttctatttgctgcaagaccgtgtttaacgccgcctgggtttgccactcccagtacaggcgggctacgctgccagccagcaattggcgggtttgctcgcgttccgccgcccgtgctttaaccgtacccaggcgggcagtaacctccgcccgattctttccccagatatcgagatgccagcccgccgttaagccaaaagtaccgttggtgtaccacgggccggtcgtacctgcggccggatcgttcagagcaaacggccccattaagccttctgcgctcattttttgccgctccatatccgccgaaaagtcgatctgcggaccatcctgagtggcaactgccttcgcctgggcttcagctagctgaatgcgctgttcagccacctgcatatccggtgcgttctgtagtgcattgttaattaaggaagactgttgattatcgtgatactccagccaccattggctgtctggccaaccattttcagcgccgtgggtaatgcggtgtcaacttgtgcagcgggcgtttgctggcttaacgcctggcgggtttcatgcataggcgcacacccggccagcatcagtaacagcggaaaacaggcgatggctggataaaaggaatcacgattcatgggggaataatcaggtaagaaaaggtgcgcggagattaccgtgtgttgcgatatattttttagtttcgcgtggcaatacatcagtggcaataaaacgacatatccagaaaaatatacactaagtgaatgatatcttccgatttatcttaatcgtttatggataacggcaaagggcttcgttttttcctatacttattcagcactcacaaataaaggaacgccaatgaaaattatactctgggctgtattgattattttcctgattgggctactggtggtgactggcgtatttaagatgatattttaaaattaattaatgtcatcaggtccgaaaataacgagaatatttcagtctctcatcctgttgcgctcctgtcatgtgcattgcttcatataatcactggcgcaaggagcgcgcagggggcggccaatcgccgccgccccctgcacccccgggctctggcgaacaaaatcgccgctgcgcggtgccctcggcttatcccttacggctaccgggtcgggcgcgaggtaacatccctgtaaaacgcgccctcagcccacatccatgtgggctgccccggccttcagggaacgcctcggcaattttgacgccaccaaacaaccgtgcggcctattgataaagagctaacacattgtcaaaaaacatcactatggttttttagagtttctcgatatcaattgcctgaatagcccttgcaatatcaggggaattattcaacacccgaacatgctgaaataattccgttgcttcatcgtattctttacgcaaataactcaaccactgtttaatccgcgcaacgtgatataacccggtatcgccctgcttttccagacgggtatatttttgcagcaaagcaaccacctccggccacggcattcgcggttcgttatattttaccacccggctcaggttgggaatattgagcgccccgcgaccaatcatcactgcgtcgcagccgctgatcgccatgcattgttgcgcgctctgccagtcccagatttcaccgttggcaatcaccggaatattcagccgctggcgaatatcgccaatcgcctgccagtcaatatgctccgcgcggtaaccctgctctttcgtccgcccatgcaccaccagctccgtagcgccagcctgttgaaccgcatcggcgatttcaaatttcttctcaccgctgtcccagcccagacgcactttcacgctgacgggcaaatgcgccggtacagcttcacgcatcgcttttgcaccctggtagatgagttcaggatctttgagtaacgtcgccccgccgccgctaccgttaaccgttttgctcgggcagccgcaattgagatccacgccccaggaacctaactccaccgcacgggcggcgttctctgccagccattgtgggaactgacctaacaactgcacgcgcaccagcgtaccagatggtgtccggctggcgttttgtagctcagggcaaatgcgatgaaagacttttaccggcagcagttgatccaccacgcggacaaactcggtgatgcacagatcgtagtcgttaacttcggtcagcaattcacgcaccagagagtcaagcactccctccatcggtgccagtaacacacgcatatcatcacccgcaaaaaaatgaggcgctatgttagcgcctatggtcagcggattaaaggtctgcaaagagggattgctgcaaactgcaatccctctctatgcttgatgtatgcctgagttcgctgcgcattgcgtaatgccggggagcgaaaaaataagcgctgatttcttaatgtgatcggtagcacgttttacgaattaattgtatgatgaatccatctcatctggggtgttgattatgagtaagacactgaacattatctggcaatatttacgcgctttcgtcctgatttatgcctgcctgtatgcaggcattttcattgcttccctgctaccggtaaccattccgggcagcatcatcgggatgctgatcctgtttgtcctgctggccttgcaaattcttccggcaaaatgggtcaatccggggtgctacgtactgattcgctatatggcgctattgtttgtgccgattagcgtaggcgtcatgcaatattttgatttgctccgcgcacagtttggcccggtagtggtttcctgtgcagtcagtacgctggtggtttttctggtggtgagctggagtagccaactggtacacggtgaacgtaaagtcgtaggtcagaaaggaagtgaagaatgatggcgaatatctggtggagtttaccgctgacattgattgtcttttttgccgcccgcaaactggcggcacggtataagtttcccttgcttaacccgttgctggtagcaatggtggtgatcattccttttttaatgctgactggcatctcttacgacagctactttaaaggtagcgaagtgctaaacgatctgctgcaaccggcggtcgtcgcgctggcctatcctttatatgagcagctacaccagatccgcgcgcgctggaaaagcatcatcaccatctgttttatcggcagcgtggttgcgatggtgacggggacttccgtggcattgttgatgggcgctagtccggaaatcgccgcgagtatcctgccgaaaagtgtcaccacgcctattgcaatggcggttggcggcagtattggcggtattccggcaatcagcgcagtttgcgtgattttcgtcggcatcctcggcgcggtatttggccatacattgcttaatgcgatgcgtattcgtaccaaagctgcgcgcggtctggcaatggggactgccagccacgccctcggtacggcgcgctgcgccgagctggattatcaggaaggtgcatttagtagcctagcgctggtgttatgcgggataattactagcctgatcgcaccgttccttttcccgattattctggcagtaatgggctaaaatttgcgatgcgtcgcgcatttttgatgtatgtttcacgcgttgcataattaatgagattcagatcacatataaagccacaacgggttcgtaaactgttatcccattacatgattatgaggcaacgccatgcatccacgttttcaaaccgcttttgcccaacttgcggataacttgcaatctgcactggaacctattctggcagacaagtacttccccgctttgttgaccggggagcaagtcagtagcctgaagagcgcaacggggctggacgaagacgcgctggcattcgcactacttccgctggcggcggcctgtgcgcgtacgccattgagcaattttaatgttggcgcaattgcgcgcggtgtgagcggaacctggtatttcggtgccaatatggaatttattggtgcgacaatgcagcaaaccgttcatgccgaacaaagcgcgatcagccacgcctggttgagtggtgaaaaagcgcttgcagccatcaccgttaactacacgccttgtggtcactgccgtcagtttatgaatgaactgaacagcggtctggatctgcgtattcatctgccgggccgcgaggcacacgcgctgcgtgactatctgccagatgcctttgggccgaaagatctggagattaaaacgctgctgatggacgaacaggatcacggctatgcgctgacgggtgatgcgctttctcaggcagcgattgcggcggcaaaccgtagccacatgccttacagtaagagcccaagcggtgtcgcgctggaatgtaaagacggtcgtattttcagtggcagctacgctgaaaacgccgcattcaacccgactctgccaccgttgcagggagcgttaattctgttgaatctcaagggttatgattacccggatatccagcgcgcggttctggcagaaaaagccgatgcgccgttgattcagtgggatgccacctccgcaacgctgaaagctctcggctgtcacagtatcgaccgagtgcttctcgcttaagcctggtgccggatgcggcgtgaacgccttgtccggcttgccagccctctcctggtgtcgaaattcccggcaaacagtttgccgtttcttgcgcaaaaccagcgggtaaagtagcctgatggaaattttccttagatcgagtctcctgcatgttaaagcgcgtgttcctcagcctgttagtcctgatcggcttgctgctgttgactgtgctcggcctcgatcgctggatgagctggaaaaccgcgccttatatctacgacgaattgcaggatctcccctaccgccaggtcggtgtggtgctcggaacagcaaaatattatcgtactggcgtaattaatcagtattatcgctaccgcattcaaggagcgattaatgcctataacagcggtaaggtaaattatctattactgagcggcgataacgcattgcaaagttataatgagccgatgaccatgcgcaaagatttaatcgctgctggtgtcgacccaagtgatattgttctcgattacgcaggctttcgtacgctggattccatcgtgcgtacacgcaaagttttcgatactaatgatttcattattatcacccaacgtttccactgtgagcgagcattatttattgcgctgcatatggggattcaggctcagtgttatgccgtaccgagtccgaaagatatgctgagtgtacgtattcgtgaatttgccgcccgtttcggtgcgctggctgacctttatatttttaaacgtgaaccgcgttttttagggccgctggtccctattccggctatgcaccaggtaccggaagatgcgcaggggtatcccgccgtcacacccgaacagttacttgaattacaaaagaaacaaggaaagtaattatggatgtacagcagttttttgtcgttgccgtttttttccttatcccgatattttgtttccgcgaagcatggaaaggctggcgcgcaggcgcgattgataaacgggttaaaaatgcaccggaaccggtgtatgtctggcgagcaaaaaatcccggactctttttcgcttatatggtggcatatatcggcttcggaattttatctatcggcatgattgtttatcttattttctatcgttaatattcccctctccagttaattattgagaataattattacttcacctgataagctgcggatatcacattcctaaccgcagctatttgtgaatcttttcacagtttaaattcccccgcacgcttagccttaatatcagtacattattatttactaaacgctcgccttaattacctatagcattaaggaagatcacatgccgcaacaaaattatctggatgaactcactccggcttttacgtctttactggcgattaaagaagcctctcgctgtttattatgtcacgacgctccctgtagtcaggcttgcccggcacagaccgatccggggaaatttattcgcagtatctactttcgtaattttaaaggcgctgccgagacaattcgcgaaaataatgccctcggtgccgtttgtgccagagtgtgcccgacggagaaattatgccaaagcggttgtacccgtgccggtgttgatgctcccattgatatcggccgcttacagcgttttgttactgattttgaacaacaaaccggaatggaaatttatcagcccggtactaaaacgctcggcaaagtcgcgattattggcgcaggtcctgccggattgcaggccagtgtgacactgacaaaccagggttatgacgtcacgatttatgagaaagaagcgcaccccggtggctggttgcgtaacggtattccgcaattccggttaccgcaaagtgtgctggatgcagagatcgcccgtattgaaaaaatgggcgtgaccattaagtgcaacaacgaagtcggtaacacactcacccttgagcagctgaaagcagaaaaccgcgcggtactggtcaccgtggggttaagtagcggttccgggctaccgctgtttgagcatagtgacgttgagattgccgtcgacttcttgcaacgtgcacgacaggcgcaaggcgatatcagcattccacaaagcgcattaattatcggcggcggtgatgtcgcgatggacgtagccagcacgctgaaagttctcggctgtcaggcggtaacttgcgtagcgcgtgaagagttagatgagtttccggcaagcgaaaaagagtttaccagcgcccgggagctgggcgttagcatcatcgatggattcacgccagtagccgtggaaggcaataaagtcacgtttaagcatgtacggttaagcggcgaactgacgatggcggcagataaaattattctcgccgtcggtcagcatgccagactagatgcctttgcggagttagagccgcagcgtaacaccatcaaaacacaaaattaccagacccgcgacccgcaagtctttgctgctggcgatattgttgagggtgacaaaaccgtggtctatgccgtgaaaaccgggaaagaagccgccgaggcgattcatcactatttagagggagcttgcagttgttaaattaatatttagagggagcttgctcatgttaacgaaagatcttagcattactttttgcggcgtgaagtttcccaacccgttctgcctctcttctagcccggtaggcaactgctatgagatgtgtgccaaagcctacgacacaggttggggcggtgtggtgtttaaaacgatcggcttttttatcgccaacgaagtcagcccgcgttttgatcatctggtgaaagaagataccggttttatcggcttcaaaaatatggagcagattgctgaacatccgttggaagagaatctggccgccctgcgtcggctgaaggaagattacccggacaaagtattgatcgctagcatcatgggggaaaatgagcagcaatgggaggagctggcgcgcctggtgcaagaagctggcgcggatatgatcgagtgtaacttctcctgtccgcaaatgacttctcatgcgatgggtagcgatgtcgggcaaagcccggagctggtagaaaaatattgtcgggcagtgaaacggggttccacgctgccaatgctggcgaagatgacgccgaatatcggtgatatgtgcgaagtggcgctggcggcgaagcgcggcggcgcagatggcattgcggcgattaacaccgttaaatccatcaccaatatcgatcttaatcagaaaatcggtatgccgatcgttaacggaaaaagcagtatttccggatattccggtaaagcggtaaaaccgatcgccctgcgcttcattcagcaaatgcgcacccatccagaactgcgcgatttcccaatcagcggtatcggcggcattgaaacctgggaggatgcggctgagtttttattgctcggcgcagcaacgttacaggtgaccaccggcatcatgcagtacgggtatcggatagtggaagatatggcaagcgggttgagccattatctcgccgatcagggatttgatagcctgcaggagatggtaggtctggcgaataacaatattgtcccggcggaagatttagaccgcagttatattgtctatccccgtatcaatcttgataaatgtgttggctgtggacgctgttatatttcctgttacgacggcggtcaccaggcgatggaatggagcgagaaaacccgcacaccgcattgtaataccgagaaatgtgtgggttgtctgctttgtggtcacgtctgcccggtgggttgtattgagctcggggaagtgaagtttaagaaaggcgagaaagaacacccggtaacgttgtaaaaccagagacgcatccggcatttggttcctgtcgccggatgcggcttgaacgccttatccggcctacaaaaccatacaaatcagtatgttgagcttattgtaggccggataaaacgcgccagcgttgcatccggcatttggctcctgttgccggatgcggcgtgaacgccttatccggcctacaaaaccacacagatcatgatgttatgtgcgtttatgaccgaatgcggaccacattcacatcatttcttacgcgcgtatttcagactatccagcgctacggcgaagataataatcgcccctttgatgatgtactgccagtatgggtttacgccgatatacgtcaggccatagttgatgacggtaaaaataattaccccggtcaccacgccaatcaccgtccccacaccgccgctgaagcttacaccgcctaccacgcacgccgcgatagcatccagctcatacataaagccgaggttgttggtggcagagccgatacgtccggcttctaacatcccgccaaaggcatagaacacgccagacaacgcgtagatcatcagcaggttcaggccgacgttgacaccagatacttttgccgcttccgggttaccgccaatggcaaaaatgttcttaccgaagcgggttttgttccacaacacccagacgaacgccaccgcaatcaacgcgtagaaggtgatgtaagagagacggaaactccccagcgcgacaaagccctgagcaaaggtagagaagccactgtcaaaaccagaaattgggctcgccccgacaaagtcgtaatagaggctgttgatgccatagacgatgatcatcgtgccgagcgtggtaatgaacggcgtcacgttgagataagcgataatcagaccgttgatcaaaccgatcaccgcaccaatggcacagacaatcagaataaccagcgcaatcggcatcgtcgccatttccgggaacactttgttggcgttatccatggactgcaataatgtcgcagccaccactgccgccagccctacctgacgaccagcagaaagatcggtcccctgggtgacaattaaccctgccacaccgagcgcgataataatacgcacgctactctgggtgagaatattacttaagttcaacagacttaaaaatgttgggtcctggaaaataataatcgccagcaaaactaaaagaacgacgtaaataccgccctctttcaggtaagtaagaaaacttttcttatttaacgcactcatgggaagcccctaatcttaaaggtgcaaagacgcaagacgcagaatttcgttttgcgttgttgtttttgtatcgacaattccggaaacgagaccattgctcatgaccagaatacggtctgttatccctaacaactcaggcatttcagaggagataataataatccccttgcctttcttcgccagttcggcaattaactgataaatttcaaacttcgccccgacatcaataccgcgcgtcggttcatcgagcattaatatttctggttgcgttagtagccagcgaccaataatcaccttttgctgattaccaccggagaggctaccaatttgcgtccgatgacccggcgtttttacccgcatgctatcaatcacccactgggtatcgcttttcatccggctgttatccagtaaaccaactttatttttgtagttgcgaatattggaaattaagctgttaaaaccaatatccagataggcataaattcccgtactgcggcgctcctcagttaccagtgcaaatccatggtttatggcttcgttggcattatggttattgatctgtttgccgtgcaacgttatggtgccagcgcttttctcgcgaataccaaataacgtctcaacaatatcggtacgtttcgcccccaccagaccggcaataccgaggatctcccctttatgcagatcaaagctgacatcgcgaatgctcggctggcgcagactcgtcaggttacgtacctcgaggatgacttcgcccggtttgttttctttgtcagggaaacgctggttaagagaacgcccaaccatcatggcgatgatcttgtccatcgtcagtcctgccagcggttcggtggcgatccactgaccgtcgcgcaatacggtaacttcatcacataactggaagatttcttccattttatggctgatataaacaataccgcagccgcgctcttttaatttacgaataatagtgaacagatgattgacctctttttcggttaagctagaagtcggttcatccataatcacaattttcgcgttataggaaaacgctttggcgatttcgatcatctgcatttggctaacggataatgtgccgacgcgcgcacgcggatcgatatcaatatccagttcgtcaaaaatcgctttggtttcgcggtacattttgtcctgatcgacaaacatgcctttggtgggatatcgccccagccacatgttatccatcacgctacgttgtaataccaggtttaactcctggtgtaccatgctaataccattttccagggcttcttttgcagaatggaaatcgatctctttaccctggaataaaatggtgccggagtctttttgataaataccaaacaggcattttaataatgtgctttttcctgcaccgttttcccccattaatgcatggatagaatgtggccggacttttaaattaacgttatcaagtgccttaacaccaggaaaggacttgttgataccgctcatttccaacaagtattccccggaggacggagtcgtactgctgaccatataattttaccttgttggccatacaataagggcgcagtaatagactgcgcccaatcagtcttatttcttgctgaattcagccaggttgtctttatctacgccaacataaggtacgcggaccactttgttgtcgattttccagttggtgccatcagccgcacctttaccatcggccaggtttttcgccagatcaaaggtcgctttcgcctggttgttagcatcgttcagtacggtgcccgccagtgcaccggatttcaccagcgccagcgcttctggcagcgcatcgacgccaaacaccggaatgctggacttgttgtgtgctttcagcgcttcaaccgcgcccattgccatcgcatcgttgttggcgataaccacttcgattttgttggcgttcgggccagacagccaggcgtccatcttatctttcgcctgagcggtgtcccacattgcggtatctaactgtaactgttcagttttgatgcctttatcgttcaattctttaatcacgtaagtggtacgtgcttctgcatccggatggcccggttcacctttcagcagtacgaactgaatctgaccgtctttgttcagatcccaaccctgattcgccgcccagtgtttagcaatcaaatcgccttgaataatgccggactctttggagtcagtgccaacgtagtaggctttgtcgtagctatccagcgccttacgagacggttctttgttgaagaaaaccaccggcacgttttgcccacgcgctttctcaatcaccgtacccgcagctgccgggtcaaccaggttgattgccagtgccttcacccctttcgccagcaatacgtcgatctgatcgttctgcttggactggtcattctgagaatcattcatcagcagctgaacatctggcgcggctttcgcatcttgctcaatagccttgcgcactacagacataaagttatcgtcgtacttatagattgttacaccaatgcgagtatcagcagcgtgtgcagcggcaccgaataacatgctggccatcacagcagacagggttaacaccttcttattcatggtatctccggtttttcttatgcagggtagtgcttgagataaatgctcggcggggcagtagagttaatgaagtgttactgaacgccgaagctcactttttaaaattcgttcttccatgcccggtaacgctccagaaaacggctttaattgttgttatgacgctgttacctcggcaaaagtgattattcactgttacatacgggttacaacgttaaaacggtgcaatcatagctatcacattgttaagatactgtgaaatcactcacagattgaaagcggttacatcgcctgatttgtactgttagtgatcgccgccgcattctggcgtgttgcgacagaatggcgacgcactaacgtcggcataaaacagtggctggcacgaggatcaatattgcctgctgccccctgcaaggccagttcggtggctaatttcgccatactagcaatgggataacgcacggtcgttaattgcgggtcggtgtaacgggcgatgggaatatcatcgaaaccgatgatactgagatgtaacggaatcgcaatgccattatcttttaatgctgtcagtgcgccagcggccatattgtcgttataagcaaatacagcggtaagttgtagattgcgccccagcagttcaaccatcgccgcctcaccgcccggcatgtccggcgtaccagcgccaatccagctttccggcggaataatatcctgctctttcaacgcactcatccagcctgctttacgcatggcgtcatcttcaatgccgtggctggaagaaagataaccaatacgttgatgaccgttattcagcaacatgcgcgtcgccattcgggcaccgctgagattatccaggcaaacgcaacgatgggcgtaccccggcacaacgcggttgattaacaccataccgggaatgttatccataaattgcgccagttcatcgtcactcaatgctttactgtgaacaatcaacgcattacaacgctggcgaattaacacctcaatggcgtgacgctctttttccgcttcatgatagctattgccgattagcacgtatttctgatgctgctgagcgaccagatccaccgcttttaccagcgcgccgaaaaacgcatcagaaacgtccatcaccaccacgccaatggtgtcgctaacctgagttgccagcgcctgggcattggcgtttggccgataatccagctcactcacggctttcattactgcttcacgcgtgtcggcactgaccagcgtgctgttattgagcacccgggaaaccgttgccacagagacgccagcctgacgcgctacatcacgaatggtgatcatattcactacctgttatgagattgcagtaaatgactgcttgctggcggctattttgtcagcactgaatacaggacttcgtgaatcgagtcacagcaatggaaacggttacagccgttttgttaacgaatgtgatccagatcgttatctacttgttttagatattgccggtccggcagcacgcaaagttaactgacgccagagccattccaccggcccctggcggaagtaacgcagccagataacagagaagaggatattcgccagccataccggaataacaaacgccagcagctccaggcggtcaaaatgcataaacaaaccgaggtggtaaaaaagcgtggtacaaatcagcgtttgcaatagatagttggtcagcgccatccgtccgacgcaggcgatcgcaagcaccagcttaaagcggctcaattgcggccagaagccataaaacaggctcgcatagccaatcgcctgaaacggcgcactcagttcccgcggcatttgaagtaagaaggcacaccagcgatacgcccagtccagctgccattgcagggcgatggcaggaaggttaatggtcaccccaatcgccaccagcacaaaaccagtacgacgatagtgacgtaagctgaactgccctttcagccagccgctgcgcatcagcgccgcaccaatgagcatcatccctgccagttgccagccatactgtgcgcccagtgccagtaaactgttgccaacaccatcggcacgattactgatcgcttcaacgccgccgtgaagcttccagtatttttcatacaaaatagcgcttgcatccggcgtccaggcgcggctggtctggctgtcggaaatcagccccaataacagcaaaacgccaagccccaccagataaagcatgacgcctgtattaaacaggctttttacgcttggcgcatcgcgcaccagccgccagcagattaagcccaccagcccgtaagccagcaaaatatcgccgtcccagaacaataaaccgtgaataaagcccaacaagactaacagcgttaaccggctctggatccagcgtctgccacggggcagcaacatttgcaggcccgcaccaaacagtagcgcaaaaagcgtgaggaatttcacctggccgatgagatcaagaaatgcccaagtccatgcatcccgcggcgtaatagcaccgtaccaggcgggattgagataagccgcctttggtagcccaaaggcgctgatgtttaatagcaggatccccagaatggcgacgccgcgaacaaaatcgagcgtgacgttgcgctccatggttcctgccttttaatcagttgtgatgacgcacagcgcgcagaaactcgtggcgcgtattctgactggatttgaacaatccaccaagagaggtcgttgtcgtggcactggttgcatcgcggatgccacgcgccttcacgcagtaatgcaccgcgtcgatgctgacagccacgttattggtgcccagcagcgtttgtagcgcaataagaatttgctgcgtcagacgttcctgcacctgcggacgctgggcaaagaactgcacaatgcggttaattttactcagaccgatcacgctatctttcgggatataggccaccgtcgctttgccatcgatggtaacaaaatggtgttcacaggtgctggtcagagtgatatcgcgcacggtgaccatttcatcgaccttcattttgttttcaatgagggtgattttcgggaaattggcgtaatccagaccggagaaaatttcatcgacatacattttagcgatgcgatgcggcgtttccatcaaactgtcatcagccaggtcgagattcagcagctgcatgatttcggtcatatgaccagcaataaggcttttgcgcgtttcgttatccatttcatgcacgggcgggcgcagcggtgtttccagtcctcgcgcaactaacgcttcatgaaccagggccgcttctttactgagacttggcatttatgatttctcctgcaggtgtgacgcctccgccctgcgtgggggcaaagttattaagctgatttacagcctgattattgtgcgtgaggcggcgcacataatccagtattcacagcgataattattgtaattgccgctgcctttcatcagcagatgttaaaacatcgttatgcaaatacggaagtgaaagttactcacagcacattgaataaacggtatgatgaagaaattgcaaacaacacaacaaggagccacgcatggaaatgctcgaagagcaccgctgttttgaaggctggcagcaacgctggcgacacgactccagtaccttaaactgcccgatgacgttcagtatctttctccctccacctcgtgatcacactccgccaccagtgctgtactggctttccggattaacctgcaatgacgagaacttcaccaccaaggcgggtgcccagcgggtagcggcggaactggggattgtactggtgatgccagacaccagcccgcgcggcgaaaaggttgccaacgacgatggctacgatttaggccagggcgcaggcttttatcttaatgccacgcaaccgccgtgggcgacgcattaccggatgtatgattatctgcgcgatgaattaccggcgctggttcagagccaatttaatgtcagcgaccgctgcgccattagcggtcacagtatgggtggtcacggtgcgctgattatggcgctgaaaaatccgggtaaatacaccagcgttagcgcctttgcgccaattgtgaatccgtgcagcgtcccgtggggaatcaaagcgtttagcagctatttaggtgaggacaaaaatgcatggctggaatgggacagttgcgcactgatgtatgccagtaacgcgcaggatgcgatcccgacgcttatcgatcagggcgataatgatcagtttcttgccgaccagttgcaacctgcggtactggcagaagccgcgcgccagaaagcgtggccgatgacgctgcgtattcagccgggatatgatcacagttactacttcatcgcctcttttatagaggatcacctgcgcttccatgcgcagtatttactgaagtgaaagtccgcccggttcgccgggcatcttctcatcagaagcgataatccactgccataaagtaacgacgtccgtcttcgttatagctgtagtcgtcacgactgagatccttgtcgccaaggttcagcacgcctgcgcgcagtttgacgtctttagtcacctgccaggccgcgccggtattccagatggtataaccgcccggtgttttagccgtcgcgctgtcggcgcgtttctgcccggtatagtgcccagaaacatagaaactccagtcttccagcgccagcggtttccagtccagcgtaccgttagcagtatggaacggcagatcggatagcggtttgttttcgccgttgctgacatcacgaccatcgttgtaggtgtagttgatgctcagtttccattcatcgttgaacggaattttcagttcggtttccacgccctgaatacgagctttgttaacgttgtagtagctaaataccggtatgcgccgtccgttagcgcccgtctcaaaaccaacaaagttttggtagcccggtgcagcgttgacgtcagacgtacggctgatgctgatacgatctttcacatcgttacggaaaacggtaacgctggattcaaccccttccagccagccttcttcacccatgtagtaaagccccagctcccaactttcgctggtttctggtttcagatccgggctacccacaatcttacatgcgccacggcaggaattgctcgtccagtcagggctaagttgcaacagagaaggtgctttaaatgccgtcgcccagccccctttcaccgttacggtgtcggtggcgttataaaccaggtaggcacgcggactccagtgttcaccgtaggtttcgtgatcgtccatacgcacgccggtcgtcagcgccagcggctcgaagatccgccattcatcttccacaaacagcgcgtactggctggcagacgttttggagctggttcccccggtcaggttcaccgcatcgctaagtttgtcgtgacgccattcaccgccaaccgtgagaaactgattaatcgccgtcagcggcaacgtgtatttgccgtcgaccgtattgctttcggaagttatcgggctgctgttgccagggtttttgttctcgactttctcaccgtagtatttcagttcgctggtgccgtaatcccaacgcccattatggctgacggagtagttctggcgttccaggcggtttttgtccaggctgtcggaatcacgatcctgacggtcgaaaccgtatccggcagtaaaatcgtgattttgattcggtgtccaggcaaattcgacattgccgtcgcggctggagaatccttcaatacgcggcgtttctccggtatcggtggtcgtactgttttgcgggtcatccttttcacgttttgccaggctgccgtaagctttcattcccagcacaccatcaattaatggtccactggtaaagaactgaccgttataggtgtcaccgcgatcgcgatgttcctgaatggtggtatcgacggtaacggtaccgctccatttctgaccgatttttttggtgatgatattcactacaccgccgagcgcatcggaaccgtacaggctgctcatcgggccacggaccacttcaatacgttcgatggaatcgaccgggatccagttcagatcgaaatcattgtggcggaagacggcattgcgggagttcacgcgtttaccgtcgacgagaatcagggtatagctgctgtccagaccacgaatactaacgcccttacggttatccccttcgttcgtcagttgtacgccaggcacttctttgaggacatccttcagattctgtaccggttttcgctgcaggtcttcctgggtaatgacgctgatactggcaggtgcatctttaagattttgttccacggaagatgcagtgacaaccatcgtttcgccatcatcatcgaccgctaacacaggccatgcacaagaaatagcggacaaacacagcccgacccgtacgaaagggttcaacctaaacattccatatctccatgaggtaactacgaaaataaaatgggttatcgctcacatcttcttcacgtccccttgcgtacggcagcatcgcggtggacttattttttatgcaggtgatcatcccagaaagccggaacagcctctgatttgtcagccttttttgattgcggcgtaacgataatgcaaacgataacaattatcaatccaaatgttaaattttatatccgcatgatttgtcagggaaatggaattgaaaaagccctctcggttgagagggcttagcaaggaagggaggaaacttatttcttatcgttctgcgggaacttcatttcgctgtagcgtacgaagtgagttcctttaatcagcttgtagccgaaccaaataatcaggaacagcgggataccaatatacgttgccgctacgccgccccagtcaatagtatctttcaggaacgcttcgtagttctggcccaaagtgataatcagacacagaatgaatgcgaagatcggccccagtgggaagaaaccactacggtacggcagatcgttaatgtcgtgtccctgcaatacgtaaccgcgacggaagcgatagtggctaatggcaatccccagccaggcgataaaacccgtcatcccggaggtgttcagcagccacaggtataccgtctggttgccaaacatggaggtcaggaagcacagaccggcaatcaccgtcgtcgcatacagcgcattacgcggcacgccaccacggctcagtttagcgaaaatgcgcggcgctttaccgtcacacgccagggtgtacagcatacgagtagacgcatacataccggagttacccgcactcagcaccgccgtcagaataactgcgttcatcaccgccgccgcagagagcagacccgcgtgctggaacaccagggtgaacggactaacgctgatgtctttaacatcgttacgcagcaggctcggatcggtgtacggaataatcaggctgataatcaggatcgcgaacacatagaacaacaggattcgccagaacacctgacgtaccgcgcgtggaatgtttttcgccggatcttcggactcgcctgcagcaataccgatcagctcggttccctggaaagagaagccgacaatcatagctacgccgatcatcgccgcaaaaccaccagcaaacggcgcttcgccgattgtccagttgctccagcccgcaggctgcgcgcctttgaagataccgataatcatcagcacgccaacgatgataaagacaataactgtcgtgactttgatcagactgaaccagtattccgcttcaccaaagccacgaacactgatgtagttcagcaggaagataacgccgaggaacaacgcactccagatccagcccggtgtatccgggaaccaccagctcatgaccagctgagctgcaaccaggtcaacggcgatagtcaccgcccagttgtaccagtagttccagcccagcgcgaagccaaagccttcttcaacatagttctgaccgtaagtggcaaagctaccggaaaccggcatatatgcagccagttcaccgagactggtcatcaggaagtaaaccatcaggccaatcagcatatagctgagcaatgccccgcccggacctgcctgagaaatcgttgcgccagaggcaacaaaaagacctgtaccgatggaaccgccaatggcaatcatcgtcaggtgacgcgcctttaattcacggcgtaagcccggcgcttctgtggttttagtttcggaaaccatacaaaaatgctatccatcttaaaaatgaggcgcgattgtagcagacgattggcaatccttccggcagaaatacacggttataagacaccttcatgatcgcccagggattataagtaaagcagccaatctcttttctggcgaatgcatgctgaaggcgctgcgtcacgaaatcgacacagcaccagcatgttcttgtacagcaacttaacgcggcacatttgcgggatcgcaatagtccagaaagcgccgtagcgcgttggaaaggtgtttttgccgatgatgtatacgccacaacgtacgcatcaggcgcggcagagggaccgcaacttcacttaatgtgcctgcctgcaattgatcttcaatcacacgtcggctcaggcaactaattcccaacccatgacgcaccgcatgtttgattgcctcggagttacctaattccatcgccatctcaaacttcggtaaatgactcagcaacagataatcgacaatctcccgcgtgccggaaccgcgttcacgcaggatccacggcgcagcggccagctgttctaaggtgaccggaccacgggccaacgggctagtcggcgcggcgaaaaccaccagctcgtcttccagccacggttcagaaatgatttcagtgctgtggcacggtccttcaataaagccaatatcaacgcggaaatccagcaccgcttgcatcacgtcctggctattcccaacgctaagttcaatcggcaactgcggataatcatggcgataacgggcgataactgcaggcagaatgtagttaccgatggtactactggcatagatacgaatcgcgccgttgtcttcgcgaaacagttgttcgatttcaaccgcctgttcaagcaatgccaacgcacgcggatagagcagccgcccgtgttcattaacaaccagtcttttccccacgcgatcaaacagttgcacgccaagctgcccttccaggtcggtcaaggctgcgctcactgcactttggctcaacgccagcatcacgctcgcctgggtggtacttccacttttcaatacttctgcaaaaacttccaactgccggagggtgatgtgcatagtcgcttaccacttataaagattaattataaatatataatcaattttatttttaaaccagttagtcgtaaccttatgcccggttaaaggagagggttatgacgaatatcaccttacagaaacaacatcgtacactgtggcattttattccggggttagccctgagtgcagttatcaccggggtcgccctgtggggtggttccattcccgcggttgcgggtgccgggtttagtgccctcaccctcgcaatcttgttggggatggttttaggcaacaccatctatccgcacatctggaaaagctgtgacggtggtgtgctgtttgccaagcaatatttattacgtctgggtatcattctttatggcttccgtctgacgttcagccaaattgccgatgtcggtatcagtgggatcatcattgacgtgttgacgctgtccagtaccttcctgctggcttgcttcctggggcagaaagtgtttggtctggataagcacaccagctggttgatcggtgccggtagcagtatctgtggtgctgccgcggtactggcgactgagccggtagtgaaagcggaagccagtaaagtaaccgtggctgttgcaaccgttgttatcttcgggaccgtcgcgattttcctctacccggcgatatatccgctgatgtctcaatggtttagtccggaaactttcggtatctacattggttctactgtgcacgaagtggcgcaggtggtggcggcaggtcatgccatcagcccggatgcggaaaacgcagcagttatttccaaaatgctgcgcgtgatgatgctggctccgttcctcatcctgctggcggcgcgtgttaaacagctgtctggggcgaacagcggcgagaaaagcaaaatcactattccgtggtttgccatcttgttcatcgtagttgccatctttaacagcttccacctgttaccgcagagcgtggtgaacatgctggtaacgctggataccttcctgctggcaatggcgatggcggcgctgggtctgaccactcacgtcagcgcgctgaaaaaagctggggcgaaacctctgctgatggcactggtactgtttgcctggctgattgttggtggtggtgcgattaactatgtgattcaaagcgtcatcgcataaaccactacatcttgctcctgttaacccgctatcattaccgttttcctccagcgggtttaacaggagtcctcgcatgaaatacattggagcgcacgttagtgctgctggcggtctggcaaatgccgcaattcgcgccgccgaaatcgacgcaaccgcgtttgccttgttcaccaaaaaccaacgtcagtggcgtgccgcaccgctcacgacgcaaaccatcgatgaattcaaagccgcctgtgaaaaatatcactacacaagcgcgcaaattcttccccacgacagttatctgattaacctcggacatccggtcactgaagctctggaaaaaagccgcgatgcctttatagatgaaatgcagcgttgcgaacagctggggctttctttgctcaacttccaccctggcagccatctgatgcagattagtgaagaggattgccttgcgcgtattgccgaatccatcaacattgcgctggataaaactcaaggtgtgacagcggtgatagaaaacaccgccggtcagggcagtaacttagggtttaaattcgaacatctcgcggcgattatcgacggcgtggaagataaatcccgcgtcggcgtctgcattgatacctgccatgctttcgctgccgggtatgatttgcgtactccagccgaatgcgagaaaacattcgcggattttgcccgtactgtcggctttaagtatctgcgcgggatgcaccttaacgatgcgaaaagcacctttggcagccgcgttgaccgccatcatagcctcggtgaaggcaatatcggtcatgatgcgttccgctggatcatgcaggacgaccgtttcgacggcattccgctgatcctcgaaaccatcaacccggatatctgggcagaagagatcgcctggctgaaagcgcaacaaactgaaaaagcggtagcctgaagatgaataaccgggaaaaggagatccttgcaattttacggcgtaacccgctgattcagcagaacgaaattgcggacatgctgcaaatcagccgtagccgcgttgcggcgcatattatggatttaatgcgcaaaggccggattaaaggcaaaggttacattctcaccgagcaggaatactgcgtagtggtggggacaatcaatatggatattcgcgggatggcggatatccgttacccgcaaagcgcttctcatcccggtacaattcattgcagtgcgggcggcgtgggacgcaacatcgcccacaatctggcgctgttaggccgtgacgtccatttgcttagtgtgattggcgatgacttttatggcgaaatgctcctggaagaaacgcgccgtgccggcgtgaatgtctccggctgcgttcgtttgcatggtcaaagcacaagcacgtatctggcaattgccaatcgagacgatcaaaccgtgctggcgattaacgatacccatctgctggaacagttgacaccgcaactactgaacgggagccgcgatttacttcgtcatgcgggcgtggtactggctgattgcaacctgacagccgaggcgctggaatgggtctttaccctcgctgatgaaatcccggtgtttgtcgataccgttagtgaattcaaagcgggcaaaatcaaacactggctggcgcatattcacaccctgaaacccactttaccggagctggaaattttatggggacaggcgatcaccagcgatgctgaccgtaataccgcagtgaatgcattgcatcagcaaggtgttcagcaactgtttgtttatttgcccgatgagagtgtttattgcagcgaaaaggatggagaacaatttttgctgaccgcgccagcgcatacgacagtagacagttttggtgctgacgatggttttatggcgggcctggtatatagctttcttgaaggatacagtttccgcgacagcgcccgttttgcggtagcctgcgcggcaattagccgcgccagcggcagcttaaacaaccctaccctgtctgccgataacgcgcttagtttagtgccaatggtgtaacaatgttgccggatgcgacgcttaacgcgtcttatccggcctacaaatcaggcaatttcagcaagtaaatgtaggcctgataagcttgcgcatcaggcaatgacactcaagctaaaccaataaagaacccggcaatggtcgcactcatcaagttggaaagcgtcgccgccgccagcgcccgtaaaccaagctgggcgatttccggcgcacggtgtggcgcaaccgcagaaaacgcccccaccaccaccccgatagaaccaaagttagcgaaaccgcacaacgcgaaggaaataatcgccacagttttagcatcgagagtgccagccgtttgcagatagggactgaaattgagataagcgacaaattcatttattgccagtttctgtccaatcaaactcccggcaagattcgcatcactccagtccacacccatcacccacgccagtggagccagcaggtaacctaaaatggactccaggctggcatgttcaaaaccaaaccagccaccaacgccgccgataataccgttaatcaacgcaattattgcaacaaatgccatcaccactgttgccacacctgcggcgattttcagcccggtcattgcccctgtcgcagcggcttcaataatgctttttggcggtgtttcggtgaaagagaggttattaaaggaaacctggctagattccgttgccgggcttaacaggcgggcaaacaagatcccgccagggatcgccattaaacttgccgccagcagatattccacaggcacgcccagtgcggcgtaaccaatcattgtgctaccagcaatgctggccatgccactacaaatcgctgtaaataattcattgcgattcagacgatcgataaagggtttgacgattgccggaatttcgttttgcccgaggaaaatggtggtgaccgcgacgaaactctcgatcttgctgatatttaatgctttctggaagataccgccgagaattcgaattaaaatccccatcacaccgatgtagtagagaatactcaccagcgcggtgacgaagataattgccggtaacaccctgaaaccaaagataaatcctgcaccatcaaataaggtatccattttcggtccgaccagagaaccgaagataaatgcgctacccgcgtcgctgtacgccatcactttatgcacgccaaaagcgactttttcagcgacccaacgccctggcggtaaccaaagcataatgccgccaatcacgacctgtaacactaacgccgcgccaacggtacgcaggctgatcttcttcttgtttacactcagtaaaaacgcaatcgtcagcaataccaccattcccagaacacttctcatgacatccatagtgattatctcttcatgtcatattgggcgacggctttctgcccatcagaaatagccaggcctgcatcttgcgataccggcccggcttgttatcaacacttaatgggttttgatgtagccgcgcacgcactcttcgactaatccccagaaccagtctgtatcaatagtgatgccgactttggtattggcgggcttgccaagaacgcccagctcgtcgcagacggtacgcccatagcaagggccactgttgacgtccacttcgacgtacatctcctgggttttaatgccatcagggttaatcagataaccgatgcaggtggcgtcgtgcaccgggccgccagcaaggccgtagttttcgaactgcgttttgagagtgaagttcatgatgtcgctgaacagctctccggcggggccgcctgccctttccatccgagcaatcacgtccggggtgcaaacggtctggttggtgagatcgaggcccatcatcactaatggaacgccggaggtgaacactacgcgtgcggcttccgggtcggcaaagatgttgaactcggcagatggcgtgaagttgcctgtaccgtaagcgccgcccattagcacaatttcacggattttgggcaggatcgcgggttgcatacgcattgccaccgcgatattactaagcggaccaaccggcaccagagtgatatcgccatcgcttgccatcagggtatcaatgatatatttcaccgcatgagtgctttctgcctggcgggtcagcggctcgaataccgggccatccagtccggtttcaccgtgaatattatcggcaacgatttgttgacgcataatgggctgcggcatccccgcataaaccggaacattaatctccagtttctggcaaacattcaggccattaattaatgttttatcaagcgtctgattacccgctacaatagtgatgcctaataaatctattgccggatgtttcgccgccatcattatagcaatagcatcatcatgacccggatcacaatccagaataatttttctcttttccattgtttatttcctctgtttccagttgcgttattttttctacagcaaagaaaattcgaccgggccgatgattgaatcttaacaacagcgtacgtatgctaaatatgagaaatctcatagcggataaacatcgtgaaagaaatccacaataatgatcttaagcagcaattgatgagtgaatccgcgtttaaggattgctttttaacggatgttagtgccgatacgcggctgtttcattttttagcgcgtgactacattgtgcaggaagggcaacagccgtcctggctgttttacctgacgcgaggccgcgccaggctttacgccacgctagctaatggtcgcgtgagcctgatcgatttctttgccgccccctgttttattggcgagattgagttaatcgataaagaccatgaaccgcgtgcggtgcaggctattgaagagtgttggtgccttgcgctccctatgaaacattaccgtccgctgttattaaacgacacgctatttttacgaaaactctgcgtcaccttaagtcataaaaattatcgtaatattgtttctttaactcagaatcaaagttttccgttagtgaatcgcctggcagcatttatattactcagccaggaaggtgatctttatcacgaaaagcatacgcaagcggcagagtatttaggcgtttcttatcgacatcttttatatgttctcgcgcagttcattcacgacggtttattaattaaaagcaagaaagggtatctcattaaaaacagaaagcagttgagtggactggcgctggagatggacccggagaataaattctccgggatgatgcagtaaaaattattttcaatagcgcgattgccggatgcaacgcttaatacgttttatccggtctacaaatcgagcattacgccagaccaataaagaacccggcaatagtcgcactcatcaggttggaaagcgttgctgctgccagcgcccgtaaaccaagctgggcgatttccggcgcgcgttttgggctaatagcgctaaatgcgccaacgacaacaccgatagaaccaaagttagcaaaaccacaaagcgcaaaggagataatcgcaatggttttcacttccagcgtgccgcccgtttgcaggtatggggagaaactcaggtaagcgacgaattcgttaatcgccagtttctgcccaatcaggctacccgcaagattggcatcactccagtccacacccatgatccacgccagcggtgccagcacatagccaaaaatactttccagagaggcattggcgaaaccaaaccagccgccaattccgccgataatgccgttgatcagcgcaataattgcgacaaacgccattaccaccgtcgccacaccagcggcgatttttagcccggtcatcgcaccgctcgccgccgcttcgataaagctttttggcggcgtttcgctgaagctcagattttcaaatgtgacctggctaggctcggttgccgggctaagaatacgtgcaaacaaaatcccgccagggatcgccatcaggcttgccgctaacaggtagtcaattggtacgcccattccggcataaccaatcatcatgctaccagcaatggacgccatcccgctacaaattgcggtaaacaactcgttgcgattcatgcgatcgataaacggtttaacgatcgccgggatctcattttgcccgaggaaaatagtagtaaccgcaacaaaagattcgattttgctgatgttgagggctttctggaaaatgctgccaaggatgcgaatcagcagccccatcacgccaatgtagtacagcagactgatgagcgcagtaacgaaaataatcgccggaagtacgcgaaaggcgaagataaaacccgcaccgtcaaacaggacatccattttcggcccaaccaggctaccaaaaatgaaggcgctaccggcatcactgtaagacatcactttatgaacgcctaatgccgcctgttctactgcccattttcccggtgggaagtagagcatgatgccaccaatagcgatttgcagcagcagtgcggctccaaccgtgcgcaaactgatgctctttttattcacactcaacagaaatgctattgccagtaacaccaccatccccacaacacttctcattatatccataatgattttcccttcatgccggtaaacccggcgtcagcgccaggttttggtatgcttgatgagtacgggcgacggctttctgcccgtcagaaattaacccgcgagacgctgatattctttggcaatttcgctcgccagaatggcgttgttgaacaccagctggatgttggatttcaggctgtcaccgccggtcagttcagcaacgcgcgccagcaggaatggcgtactttctttaccaatgactccctgagcttcagcttcagctaccgcctgatcgatcgccgcattgatagtgtgttccggcatagcaaactgttccgggatcgggttcgctaccacgaggccaccgttcagaccgctttgccatttcaccaccattgcacgggcaatttcgctggcgctgtcgagacgaatgctgacgtcaaacgggctggtgcggcagaaaaacgcaggcagcgctttagtctgatagccaattaacggcacaccgaaggtttctaaatactcagtggttaatcctaaatcgagaatagatttcgccccggcacaaacaacggtgacattagtatttgccagttcttgcaaatcggcagaaatatcgaaggtatgttccgccccgcgatgcacaccaccaattcccccggtggcaaatactttaattccggcaagcgccgcaataatcatcgtactagccacagtggttgcgccattttttccggcggcaacaacaaaaggtaaatcgcgacgactaactttggtcacgttatgcccttcacgacccagtaattcaatttcttctttgcttaaccccactttcatcacgccgccaataatggcgatcgtggcaggtacagcgccctgtttacgaatagtttcttcaacttcaattgcggtctgggcattttgtgggaacggcatcccgtgagaaataatggtgctttccagcgccacaaccggttttttgttttttaaagcgtcctgcacttccggggaaatttgtaataattcaggggaaatttttaattcagacattctgcgttctccactaagcttataacgttggcaatgcttaaatcggggttattggtgtattcacaggagagcgccatactgctacatccctgtgcgaaacgaacagattcggcaaacggcattccgtctacccaacagctagcaagtcccgccatcatggcatcgcccgctccggtaacattaataacattggttttgatcggcgcagaccagccactttcaccgctgatatcgctgtaataaacgccgtcgccgcccatgctcaataccagtcggttcaggccatgttgatggaaccaggcagcaacttttgccacatcttcacgcccactcagcgcaatcccactcagggtttccgcttcaaggcggtttggcttgagagtgtggatctgatttagacggtcgcgcactttgacacatttccatgcgctaaccggatcgacaaatacgggtacgttggcggcattatccagaatccatgccagtgcctcttcactgatattacagtccgcgacaatgacctttgccctctgaataaattcaccgtgctgtgcgagatattcagctgtaatagcgttgctaatattcatgtcatttatagcaaccagcatttcaccggtattatcgagtaaacttaaataactgctcgtattttctcccggcacaatcaggcatttatcgacataaacgccagattgattggtttgcgttagcaggctttgaccataaaaatcactgcctacggcgctcagtagccaggctttgttacccagcaacgccaggttttgtgcaatattgcgccctactccaccaggcgtaaattttattttacctggattactatccgcataatttaaactttcatgactatatccggcgacatcaatattcgcgctacctataattacgacataatccttttcgcgcatagcacgtcctctggtaaaaaattaccaaccctgtcaatccacaagaatatagatactgcaaagacggtttaaacatgtgttcatatttaaacatgtgctcatagtatgcatgttttacgtaaagtaaattaccgccagagaggcaaaatgggcagatttgagcaggctcacaaaatgcgattaaatgcctgaattacaaaagcgaggaatttgtgacgggatgcacagaacagaacaataaaaaagggcagaaaataatctgcccttgaggaaataacctgagtgtttgatgaacgtttgaagtttctactgaaagataaaaccatttaaattcataaaattacattcacaaaccggtcattctctttgcgctcatcaaatgttacaggacaggaaatttctgccctgtaacacaccttttattacgctgctttcgctactgcgtccacttccggacgtttcaggaaggcataggccaaacccgccaccagcgtaccggcaataattgctaccaggtaacccaataccggcgtaatagcgccagggatcagcagaacaaacagaccaccgtgcggtgccatcagtttcgcaccaatcgccatactgattgcgccagtcagcgccccacccacgatacagcacggcagcacacgcatcggatcacgagcagcaaacggaattgcaccttcgctaatgaagcacagtcccaataccagagcggctttgccaccttcctgctgcgctttgtcgaatttgcgacgcgccaccattgttgccagacccattgccagcggtggcaccatacctgccgccataatcgccgccatcgggccataggtttgagtactcagcagacccacaccgaatgcgtacgctgctttgtttaccggaccgcccatgtcagtacacatcatgccaccgaggatcgcccccagcagaaccgcattcgcagtccccatggtctgcagccagtgagtcagcccttcgagaatgccagcaactggtttaccgatcaggtagatcatcgccagaccgaccaccagactggaaattagcggaatgatcaggatcggtttcagcgcctccatactctgtggcagtttcaattgcgtactgattaacttcgcaatgtaaccagccaggaagcccgcaataataccaccaatgaagccagaaccggtgctgaccgccagcataccgccaatcagacccggagtgaggcccggacgatcggcaatggaaaaggcaatataacctgccagtaccggcaccatcagcgcaaaggcactaccaccaccaatctgcatcagcgccgcagccaacgtacccggctctttaaacgcttcgataccaaaagcaaaagaaagcgcgatacacagaccacctgcaacgaccatcggcagcatgtaagaaacgcccgtcagcaagtgacggtatgcgcctgcactctctttcttactttcagtggtcgccgtttgagctttgcccgccggttcatacggcgttgcttcagcaaccgctttatccagttcctgcgcggttttcttcagcgccagaccggtagaggtacgatacatcggtttaccagcaaatttcgccagatccacttcgatatctgccgccacaatcaccagatccgctgctgcgacttcttcgggagtgattgcattacccgcgccaacagaaccacgggtttcaactttcacccaccagccacgttttttcgcttcggtttcaatggcttcagccgccataaaggtgtgtgctacgccagtcgggcaagcagtcaccgcaactacgcgtttcggaccgctggcggcaactggtgctgtcgcagcgaccggcgcagtgtaaggtttcgcatggcctttggcttcactcaggaacagctcagggtgcgcaactgcccgggaaatatcgcccagccagacatttttaccgttcagcgcgctgtcgttcgggatggaatcaccgagaacaatcgccatttcagcgtcgttcggattgtcgatgatttccagttttgcttttcgcgccgccgcgcccagcagggtcttcgccatataggcgcgtgcctgaccgagattagcgtcaataatcagcagcgttttcattatgcctctcctgctgtcagttaaaaggttgtaagtcgacgcgcgccatcattgcggccaactgcggacgatcggtaatacccacattgctttgacttaccgccagggctgcaacagctgtcgccagacgcagtgtgtgttcactggattcacgcatcagcaagccataaatcaggccaccaaccatagaatcccctgcgccaacggtgcttacgacatcgacactcggtggtttggcgatccattcgccggaggcattaacccaaagcgcgccttcggcacccagactaataacaacatgcgcgatgccttgttcacgtagcgcatgtgcagcttcaatcacatctttcatttcaggcagtttacggcctgcccagatttccagctcgcggcggttaggtttcaccagccacggtgccgctttcaaacctgctactaacgcttcacggctactatcaaagataatgcaaggacactgactacgcaggcgagtcatccagtcggtgaacgcttccgggctgacgccactcggtaagcttccgctgacacagaccatatcgaactgaccgagccagctcagagaatcagtcacaaagcgttcccagtcggcgggggtgacttcaaaaccgctgaagttgaagtcggtcacttcgccgtctttttccgtcagcttaacgttaattcgggtgcgcccctgtacaacctggaaacggttggcaatgcccagctcgctgaacagttgctgaaaaccatcctgattgtctttacccaggaagccgccaacggtgacatcaattcccaggtcttttaatactttggccacgttgatgcctttacccgccgcatgcagaccggtggttttcaccaggttcacttcgccgcgttcaatttccgggcagaaaccaacaaggtcataagccggattaagggtgatagtagcaacacgtctgctcattatgcgccctccccaagaccagcagcgatagcgtcgccgattgctttcagcgcctgttcagcatctgcaccctgggcggtaaagcgtaggcgatgacctttcttaacgccaagtgccacaactttcatcagactacgtccgtttgccggtttgccggtaccatcaaggtttgtcacggtaatatcactgttaaattgtttaatggtattgaccagcatggtacctggacgagcatgcaggccgtgttcattgcgcaccacaaactccgcgcttaacacgtcgtcggtcggcgcatcatcgctggtcagcagcgccagcaacgttgccgcatccgctttcagcaagcggtcagctttattgtcgagcaataaatcagcgagacgcttaagaaccgcgatgggctgatcgtcattcatcgccacactcaccagcatggctgccgtttcgccgtccacatcaaaagcatttgccgcacggcttaccgcaatcgcgctacgcagattgccttcggcgctatcgctcagccagataccctgtccgagattcagcggttgttcattgatggctttggtgacgaaagtggcgtcaactgcccccgcctctttcagacgcgcagcgttcagcgcctgaagagtcagcagatcgctggcgacgatatccagtgtcagcatttcgttgtcgagcttcagctgctcactctgcttttcgcccatcagtaatgcgcgaagttcttctgctgttgttgcactcttcagttgttcagcaacggaatcatcgctcagtacgtgggtcagctggcgtagcaggcccagatgttcatcgctgctggcagcaataccgattgccacgtacgctacctgaccgtcaccccaggtgacgccttccgggaactgaaatacctgaacgccggttttcagcacctgatcgcgggtgtcggtagtgccgtgtggaatagcaataccattgccgaggaacgtactggtttgctgttcgcgcgccagcatgccattgacgtagccttctgctacattaccggcctgcaccagcgccgcagcgacctggcgaatcgcctcttctttgtctccggccttttcgcccggatggatgtcctgtacggataactggaacatagttctcctctcttgctgaattgaaacgattcagcctctatgagaaaaaaagcgccaacctggcttagggttaaagacaagatcgcgctgaaacgtttcaagaaagcataatacttctgtttcagcacgcaaggaaagccgtaaagttatgagcaaaagtttgatgtgctgcacaattttttgccatttttcctaattgctgatgggaaaatccgttatcagcaatttcatttcagcagcgtcagcagccaatcagcaacagtgaaatggcattttgactattcgtggcgcttttgatttcgctgtctgtttattttctgacaagcagcgtaaactccgcgtcttcctcttccagtgatcgaccagcatgcataactcccccgcagtctccagcgcgaaaagctttgacctgaccagcacggcgtttttaatcgttgcctttctcaccggtattgcgggcgctctgcaaaccccgacactcagtatttttcttaccgatgaagtacatgcccgtccggcgatggtgggattcttctttaccggcagcgctgtcattgggattctggtaagtcagtttctcgccgggcgctctgataagcgcggcgatcgcaaaagcctgattgtcttttgctgcctgttaggcgtgctggcctgcaccctttttgcctggaatcgcaactactttgttttgctattcgttggcgtctttcttagcagctttggcagcaccgctaacccgcaaatgtttgcccttgcccgtgaacatgccgacaaaaccggacgtgaggcggtgatgttcagctcttttttacgcgctcaggttagtctggcatgggtcattggcccaccgctggcttatgccttagcgatgggtttcagctttacggtaatgtatctgagcgcagcggtagcgtttattgtttgcggtgtgatggtgtggctgtttttaccgagcatgcgaaaagagcttccgctggcgaccggcacgatcgaagcgccgcgccgtaaccgtcgcgatacgctgctgctgtttgtcatttgtacattgatgtggggcagcaacagcctgtacatcatcaacatgccgctatttattatcaacgaactgcatcttcccgagaaactggccggtgtgatgatggggaccgccgccgggctggaaatcccgacgatgttgattgccggatatttcgccaaacgtctgggtaagcgtttcttaatgcgcgttgctgccgtgggtggcgtctgtttttacgcaggaatgctgatggcgcatagtcctgtcattctgttgggcttgcagctgctaaatgctatttttattggcattctgggcggcatcgggatgctctattttcaggatctgatgcccggtcaggcgggtagtgccaccacgctctataccaacactagccgcgtgggctggatcatcgcaggaagtgtggcgggcatcgtcgccgagatctggaattatcacgctgtgttctggtttgcgatggtgatgattatcgccactctgttttgcttactgcggattaaagatgtttaaggcgcggtcagcatttccagatcgataagccaggtcatggcctgctgacggctgttaccgcacatttcagcgctggcttgtaagcctgcacagactttcggtcgcagtgggctggtgaaaattttacagcgttgctgttcatcaagctgaatgcagggcgtattggcgggcttgccatctggcataccgggaatagggctggaaatactaggggcagtgcaacacgccccgcaacccggacggcattccatacgttgttctcttaaggttaaccaccggattgatgagcgcgcacagtaccaccttttttgcaccagcaaaagtgcgaataccacttgcccgaaaggcccgtcgcgagtactttgtcgcgatatttttgacattttcgactacaggaatttttcgatgccaagagcgaacgaaattaaaaaaggtatggtactgaattacaacggcaaactgctgctggttaaggatattgatattcagagccccactgcccgcggtgccgctacgctgtacaaaatgcgtttttctgatgtccgtaccgggctgaaagtagaagagcgtttcaaaggtgatgatatcgttgacaccgtgacgctgacccgccgttacgttgacttctcctatgtcgatggcaacgaatatgtctttatggataaagaagactataccccgtataccttcaccaaagatcagattgaagaagagttgctgtttatgccagagggcggcatgccggacatgcaggtgctgacctgggacggtcaactgctggcgcttgagctgccgcagaccgttgatctggaaatcgttgaaaccgcaccaggcatcaaaggggcatctgccagcgcccgtaacaaaccggcgacattgagcactggtctggtgattcaggtaccagaatacttaagcccgggcgaaaaaattcgtatccatatcgaagaacgccgttatatggggcgtgctgactaacttcagccgcatgcagaaaagggatagctcaggctgtcccttttttaatttattataccaatcttctattttgcgcttcctgaacaccttacgccctcaattttcactcgttgattgatcgccctcacacttcatcgcattaacaatccagaccaatttcaattgctgtcatataactttacactgtcgttgttaattaatcgttactaagacgtgactcctatgaatacaatcgcctccgttacgctcccgcatcatgtacacgctccacgctatgatcgccagcagttgcaaagtcgtatcgttcattttggctttggagcctttcaccgcgctcatcaggcgttactgaccgatcgtgtgctgaatgcccagggcggcgactgggggatctgtgaaatcagcttgttcagcggtgatcaactgatgagccagctccgcgcacagaaccatttatataccgtgctggagaaaggtgcggacggcaatcaggtgataattgtcggtgccgttcacgaatgccttaatgcaaaactggattccttagcggcaattattgagaaattttgcgagccacaggtggcaattgtttccctgacgattaccgaaaaaggctattgtattgacccggccaccggtgcactcgacaccagtaatccgcggattattcacgatctacaaacccctgaagaacctcactccgcaccgggtattctcgtcgaagcactgaaacgccgccgtgagcgcggccttacaccgtttaccgtgctctcctgcgacaatattcccgacaatggtcatgtggtgaaaaacgcggtgctgggaatggcagaaaaacgtagcccagaactcgccgggtggataaaagagcacgtcagttttccgggaaccatggtcgaccgcattgttccggctgcaaccgacgaaagtctggtggaaatcagccagcatctgggggtgaatgatccctgcgcgattagctgcgaaccgtttatccagtgggtggtggaagataacttcgtcgctgggcgtcctgcctgggaagtcgcaggtgtacaaatggtgaatgatgtcctgccatgggaagagatgaaactgcggatgcttaatggcagccactcttttctcgcttatctgggttacctcagtggattcgcccatatcagtgattgcatgcaggatcgcgcatttcgccatgccgccagaacattaatgctggatgagcaagcgccgacactgcaaattaaagatgtcgatttaacacaatatgcggataagttaattgcacgttttgctaatccggcgctgaaacataagacctggcaaatcgcgatggatggcagccagaaattaccgcaacgcatgctggcaggtattcgcatacatcaggggcgcgaaacggactggagcttgctggcattaggcgttgcaggctggatgcgttacgtcagcggcgttgatgatgccggaaatgccattgatgttcgcgatccgcttagcgataaaattcgcgaacttgttgcgggcagcagcagtgaacaacgcgtaaccgccctgctttccctgcgtgaagttttcggtgatgatctgccagataacccgcattttgtgcaggccatcgaacaagcctggcaacaaatcgtacaattcggcgcacatcaggcgctattaaacaccctcaaaatttaacgatttctgcggttaaagcggatgaagctcaccttcgtccgctctccccttctcttttctgccttttttagccaggattaacgctcagttaacttaccagagtattgcggagccgttgtgaccaggaccaacctcatcaccggttttctcggcagcgggaaaaccacgagcattcttcatctgttagcccataaagatcccaacgaaaaatgggcggtactggttaatgaatttggggaagtcggaattgatggtgctttgctcgccgatagcggcgcattgctgaaagagatccccggcggctgcatgtgctgcgttaatggtttacccatgcaggtagggttgaataccttactgcgtcagggaaaaccagaccgcttgttgatagagccgaccgggctgggccatccgaaacagatcctcgatctgttaaccgcaccagtctatgaaccgtggatagatctgcgcgccaccttgtgcattctcgatccgcgcttgctgctggacgaaaaaagcgccagcaatgaaaacttccgtgaccagctggctgccgcagacatcattgtcgccaataaatccgaccgtacgacgcccgaaagtgagcaagcgctacagcgttggtggcagcaaaatggtggcgatcgacaattaattcacagtgagcatgggaaagttgacggtcatcttctggatttgccgcgtcgcaatttagccgagttgcccgccagcgccgcgcattctcatcagcatgtcgtgaaaaaagggttagcagcgttaagcctgccagagcatcaacgctggcgtcgcagtctgaacagcgggcaaggatatcaggcctgcggctggatattcgacgctgatacggtattcgacaccattggcattctggaatgggcgcgacttgcaccggtggaacgcgtcaaaggcgtgctgcgtattcccgaagggctggtgcgaatcaaccgtcagggcgatgacctgcacattgaaacgcaaaacgttgcgccaccggacagccgtattgagctgatttccagcagcgaagctgactggaatgccttgcagagcgcgctgttgaagcttcgtttagcgactaccgcgtaaggttgcctgcgtttttcagtaagataattagagaaaatatgattaaaaatttgccgcaaatagtgttgttgaatattgtcggcctcgcgctgtttctttcctggtatatccccgttaatcatggattctggttgccgattgatgcggatattttttatttctttaatcagaaactggtcgaaagtaaggcctttttgtggctggttgcattgaccaacaatcgcgccttcgacggttgtagtctgctggcgatgggtatgttgatgctgagtttctggctgaaagaaaacgcccctggcagacgacgtatcgtgattattggtctggtcatgctattaactgcagtggtattaaaccagctgggtcaggcattaattcctgtaaaacgggccagcccaacattgacttttaccgatattaaccgcgtcagcgaactgctctctgttcccacgaaagatgccagtcgagatagctttcccggcgatcacggcatgatgctgcttatttttagcgcattcatgtggcgttatttcggcaaagttgcaggccttatcgcccttattatttttgtggtttttgcatttcccagagtaatgattggcgcacactggtttactgacatcattgtcggtagcatgaccgtgatattgatcggtttgccctgggtgttgctgacgccattaagtgatcgattaatcaccttttttgacaaaagtctaccaggaaaaaacaaacatttccaaaacaaataactcacagtaattaacatcatcagggttatttttatagtgaggataatcctgatgatgcgcaccgtgctttcatctatcgaacgcaaaaatcattctctaagtaaatgaatggattgcatgcgtttcactcaattgtactttaattgaccaaccccgcttattaactttctgtatcactttttcttataaaaaatcatgtaaaaccgctcgccaagaccgcaccaatcgggtaatctcgaactcgttttgcctcggcggtagattatcctcacagcatataattttgtgcgttagtccacagatttggccttaaggaattgtttcaacatgcccaggtaattagtctcgtgtcgcttggcatttttttataacgatatttgtcgttaaggacttcaagggaaaacaaacaacatggtcaaatctcaaccgattttgagatatatcttgcgcgggattcccgcgattgcagtagcggttctgctttctgcatgtagtgcaaataacaccgcaaagaatatgcatcctgagacacgtgcagtgggtagtgaaacaagtagtctgcaagcttctcaggatgaatttgaaaacctggttcgtaatgtcgacgtaaaaagccgaattatggatcagtatgctgactggaaaggcgtacgttatcgtctgggcggcagcactaaaaaaggtatcgattgttctggtttcgtacagcgtacattccgtgagcaatttggcttagaacttccgcgtagcacttacgaacagcaggaaatgggtaaatctgtttcccgcagtaatttgcgtacgggtgatttagttctgttccgtgccggtagtacgggacgccatgtcggtatttatatcggcaacaatcagtttgtccatgcttccaccagcagtggtgttattatttccagcatgaatgaaccgtactggaagaagcgttacaacgaagcacgccgggttctcagccgcagctaataaaccgtttggatgcaatcccttggctatcctgacgagttaactgaaagcactgcttaggcagtgcttttttgttttcattcatcagagaaaatgatgtttccgcgtcttgatccaggctatagtccggtcattgttatcttttaaatgttgtcgtaatttcaggaaattaacggaatcatgttcatacgcgctcccaattttggacgtaagctcctgcttacctgcattgttgcaggcgtaatgattgcgatactggtgagttgccttcagtttttagtggcctggcataagcacgaagtcaaatacgacacactgattaccgacgtacaaaagtatctcgatacctattttgccgacctgaaatccactactgaccggctccagccgctgaccttagatacctgccagcaagctaaccccgaactgaccgcccgcgcagcgtttagcatgaatgtccgaacgtttgtgctggtgaaagataaaaaaacattctgtagttctgcgaccggtgagatggacattccactcaatgaattgattccggcgctcgacattaataaaaacgtcgatatggcgatcttacccggcacgccgatggtgccgaacaaacccgcaatcgtcatctggtatcgcaaccctttgctgaaaaatagcggcgtctttgccgctctgaatctcaacctgacgcctagtctcttttatagtagtcggcaggaagattacgatggcgtcgccctcattattggcaatactgcgctatctaccttttctagtcgtttgatgaacgttaacgaattaaccgacatgccagtccgtgaaactaaaattgcgggcattcctctgaccgttcggctttatgcagatgactggacatggaacgatgtgtggtacgcatttttactgggcggcatgagtggaactgtcgttggcctgctctgctattacctgatgagcgtacgtatgcgccccggcagagaaatcatgaccgccatcaagcgcgaacaattttacgtggcgtatcaaccggtggtggatacacaagctttgcgagtaacgggcctggaagtactgctacgctggcggcatcctgtcgcgggagaaattcccccggatgccttcattaactttgccgaaagccaaaagatgattgtgccgctgactcagcacctgtttgagttaattgcccgcgatgccgcagaattagaaaaagtgctgccggtaggcgtcaaatttggtattaacattgcgccggaccatctgcacagcgaaagctttaaagcagatatccagaaactgctcacttccctgcccgcacaccatttccagattgtgctggaaattaccgagcgcgatatgttgaaagagcaagaagccacacaactcttcgcctggctgcacagcgtcggcgtagaaattgctattgatgacttcggcaccgggcacagcgcgcttatctatcttgagcgttttacgctcgattatctgaaaattgaccgtggatttatcaacgccatcggtacggaaacgatcacttcccccgtacttgacgcggtgctgacgctggcgaaacgcctcaatatgctgacggttgctgaaggggtcgaaacgccggaacaggcgcgatggctaagcgaacgcggcgttaatttcatgcaaggctactggattagccgcccgttaccgctggacgattttgttcgctggctaaagaaaccgtatacgccgcagtggtaaggtgtgcttacgtcccttattattcatagtgaaagcatgccggattgcggctaatgatgagtaaaaggaaatccgttgcagatgattgtgcgcatactgctgctgtttatcgctctgttcacctttggtgtgcaggcgcaggctatcaaggaaagctatgcctttgccgtgctgggcgaaccccggtacgcgtttaatttcaaccattttgattatgtgaaccccgccgcgccaaaaggtgggcagataacgttgagtgccctcggcaccttcgataatttcaaccgctatgcactgcgcggcaacccgggcgcacgcaccgagcagctgtacgacacgctatttacgacttccgatgacgaaccaggcagttattacccgctgattgctgaaagcgcacgctatgctgacgattattcctgggtggaggtcgctattaatccgcgcgcccgttttcatgatggtagccccattactgcccgcgatgtagagtttacttttcaaaaatttatgaccgaaggcgtgccgcaatttcgtctggtctacaaaggcaccaccgtcaaagccattgcaccgttaaccgtgcgcattgagttagctaaacccggtaaagaagatatgctgagtctgtttagcctgccggtatttccagaaaagtactggaaggatcacaaacttagcgacccgctcgccacgcctccgcttgccagtggtccgtaccgcgttacgtcctggaaaatggggcaaaatattgtctattcccgtgtgaaagattactgggcagcaaacttaccggtaaaccgtggacgctggaatttcgacaccattcgctacgattattacctcgatgataatgtcgcctttgaagcgtttaaagcaggtgcctttgatttgcgtatggaaaacgacgccaaaaactgggccacgcgttataccggtaaaaatttcgataaaaaatacatcatcaaagatgagcaaaagaacgaaagtgcccaggatacgcgttggctggcgtttaatatccaacgtccggtattcagcgatcgccgggtccgggaagctatcactctcgcctttgactttgaatggatgaacaaggcgttgttttacaatgcctggagtcgcacgaacagttattttcagaataccgaatacgcggccagaaattaccccgacgccgcggagctggtgcttctggcaccaatgaaaaaagatctaccgagtgaagtcttcacacaaatctaccagccgccggtatccaaaggcgatggctacgatcgtgacaacctgttaaaagccgacaaacttctcaacgaagcgggctgggtgctgaagggtcagcaacgcgttaatgccacaacgggtcagccactcagctttgaattattgcttcccgcaagcagcaatagtcagtgggtattgccgttccagcacagcctgcaacggctgggtatcaacatggacattcgcaaggtggataacagccaaatcactaaccgcatgcgcagtcgcgactatgacatgatgccgcgcgtatggcgggcgatgccgtggcccagttccgatttacagatttcctggagtagcgaatatatcaattccacttataatgcccccggcgtgcaaagcccggttatcgacagcctgatcaaccaaattattgccgcgcagggaaataaagaaaaattactgccgttggggcgagcactggatcgcgtattaacgtggaattattacatgctgccaatgtggtacatggcggaagaccgtctcgcctggtgggataaattctcccagccggccgtgcgccccatctatagcctcggtatcgatacctggtggtatgacgtcaataaagcggccaaactgccgtccgccagcaaacagggagagtaaatgggcgcttacctgattcgccgtctgttgctggtgatcccaacattatgggcgattatcaccatcaactttttcatcgtgcaaattgcgcctggcggtccggtcgaccaggccatcgccgccattgagtttggtaatgccggagtattacccggcgcaggcggtgaaggtgttcgtgccagccatgcgcaaacgggtgtcggcaatatcagcgacagtaattaccgtggcggacgcggattagatccagaagtgatcgctgagatcactcatcgctacggttttgataagccgatccacgaacgttacttcaaaatgctctgggactacatccgctttgattttggcgatagcctgtttcgcagcgccagcgtgctgacgctgattaaagacagtctgccggtttccatcaccctcggattgtggagcacgctgattatctatctggtgagcattccgttaggcattcgcaaagctgtttataatgggagccgctttgacgtctggagtagcgcatttatcatcatcggctacgccattccggcctttttgtttgccatcctgctgattgtcttcttcgcgggcggcagctatttcgacctgttccctctacgcggcctggtttccgctaactttgatagcctgccgtggtatcagaaaatcaccgattatctgtggcatatcacgctgccggtgctggcgacagtgattggtggctttgcggcgctgaccatgctgacaaaaaacagtttccttgatgaagtgcgcaagcaatacgtggtgaccgcgcgtgcgaaaggggtaagtgaaaaaaatattctctggaaacatgtgttccgcaacgccatgctgctggtgattgccggttttccggcgacgtttatcagcatgttttttaccggcagcctgctgattgaggtgatgtttagtctcaatggtctgggcttactgggctacgaagcgaccgtcagccgcgattatcctgtaatgtttggtaccttgtatattttcaccctgattggcctgctgctgaatattgtcagtgatatcagctatacgctggttgatccgcgtattgattttgagggacgttaatgagccgactcagccccgtcaatcaggcccgttgggcgcgttttcgtcataaccgtcgcggctactggagcttatggattttcctcgtcttgtttggtttgagtttgtgttctgaacttatcgccaacgataaaccgttgctggtgcgttatgacggcagttggtatttcccgttattgaaaaactacagcgaaagcgattttggcggcccgctggcaagtcaggctgattatcaggacccgtggctgaaacaacggctggaaaataacggctgggtactgtgggcaccgattcgctttggtgctaccagtatcaactttgctaccaataagcccttcccttctccaccctcccggcaaaactggctgggaacggatgccaacggcggcgatgtgctggcacgcattctctatggcacgcggatcagcgttctgtttggcctgatgctgactctctgttccagcgtgatgggcgtgctggcgggggcgctacaaggctattacggcggtaaagtcgatctctggggacaacgctttattgaagtatggagcgggatgccgacgctgtttttgattattttactttccagcgtcgtacagcctaacttctggtggctgctggcaattactgtcttgtttggctggatgagtctggtcggcgtggtgcgggcggagtttttacgtactcgtaatttcgactacattcgtgcggcacaggcgcttggcgtcagcgatcgcagtatcatcctgcgtcatatgttgcctaatgccatggtcgcgaccctcacctttttaccgtttattttatgtagtagcataaccaccctgaccagcctcgatttcctcggcttcggtctaccgctcggtagtccgagtctcggtgaactgctgttacaagggaaaaataaccttcaggccccgtggcttgggatcaccgccttcttgagcgtggcgatattattgtctttgctgatctttattggtgaagccgtccgcgacgcatttgatcctaataaggcggtgtaacatgacgcaaactctgttagcgattgaaaatttgagcgtgggttttcgccatcagcaaaccgtacgtacagtagtcaatgatgttagtctacagattgaggctggcgaaacgctggcgctggtgggtgagagtggtagtggcaaaagcgttaccgcgctgagtattttacgcctgctcccttccccgccggttgaatatctctccggcgatattcgttttcatggcgaaagcctgcttcacgccagcgatcaaacgttgcgcggtgtacgcggtaataagatcgccatgatttttcaggaaccgatggtgagcttaaatccattgcataccctggaaaaacagctttatgaagtgcttagtctccaccgcgggatgcgtcgggaagcggctcgtggcgaaattcttaactgccttgatcgcgttggtatccgccaggcggcaaaacggctgacagattatccgcatcagctctccggcggcgaacggcagcgggtgatgattgcgatggcgctgttaacgcgaccggaattattaattgccgatgaaccgaccaccgcactggacgtctctgtccaggcgcagattttacagctgttgcgcgaactgcaaggcgagctgaatatgggcatgctgtttattactcataacctcagcattgtcagaaaactggcccaccgcgtggcggtaatgcaaaacggtcgctgtgtcgagcaaaattacgccgctacgctatttgcaagtcccactcatccttacacacaaaagctactcaacagtgaaccgagtggcgatccagtgccgttgccagaacctgccagtacgttgctggatgttgaacagcttcaggttgccttccccattcgcaaagggattttgaagcgcattgtggatcataatgtggtggtgaaaaacatcagttttacgctacgagcgggtgaaacactgggtttagtgggcgagtccggttccgggaaaagtacgacgggactggcgctgctgcgactgattaattctcagggcagcatcatctttgacggtcagccactgcaaaatttaaatcgccgccagctgttacctattcgtcatcgcattcaggtggtatttcaggatccaaactccagcctcaacccacgactcaacgttttgcagattattgaggaaggcttacgggttcaccagccgacgctttctgccgcacaacgcgaacaacaagtgatagccgtgatgcatgaagtgggattagatcctgaaacacgccaccgttatccggcggagttctctggtggtcagcgacaacgtattgcgattgccagggcattaattcttaagcccagcctgatcatacttgatgaaccgacaagtagtctcgacaaaacggtacaggcgcaaatattgacgctattgaaaagtttgcaacaaaagcatcaactggcctatttgtttatcagccacgatttgcacgttgtccgcgcgttatgtcatcaggttatcatactgcgacaaggggaagtagtggaacaaggaccgtgcgcgcgcgtgtttgccacaccgcagcaggagtatacgcgtcagctactggcgttgagctgacgcttaaaaaggattgtagttactaaagggttcggcaattgccacaccaaaatttttcaatcggcatgttgcagcaaactcgtcctggcgatttacaaacaggcacggctcaccttcacactccagcacgctacatggaacttcgatgtcgcttaacgcctggcttagtttatacatcacgctccatgcattatcaccatccgggctaagcaatttaagcgccaccaggctgttgtcaccgcacggtccattttgcggaatcggttcaaccttgctacctgcgaaaccagcagaccagcgatagttctgcggcagtcgatggacgatactgagttgtaaactagtcacttattttccccggaagcacattcacttcacaatttgtttacatcaattttaacacatcatcaacaatccgtctttatacagatcgtaaagattgatgcctcgcctgcgtggcctctatggctctgatttaagtaatatctgcgggcgtggtcacgtttgcggggctatatgtacccgtttctgcgatctaactcaacctttttaactacaatgatgtgactttttacataaattgattttacataaaataaacatatatcgggggaatgatagatttgtggttgacatgcatcaacaaaggaagccttttagcttcctcgttgtgcaatagatcaccgttttttcggccgactggcgtacagacagaagagaatggagctggttgcgcagaatgcaatactccaaatcatcggccatgcagagttaaaggtcgcaagagaaagcaatgcgccaacaattgcccctatgccaaaacggaaggttcctgccaggctagatgccgttcccgccatatggggaaactcatcaagaatgaccgccatcgcattggaactcaccatgctcacgcagcccacaaacgccgcaacgccaaccaccaggctccaaaatcccagccccagcagcgcactgatgaccatccacgctgccataataaattgtatccacaacccgctgcggaacatatttaacgcgccaatgcggcggacgaagcggctgttaaagatggtcatcacgaacagaaaaacaatgtttagcgcaaagtaataaccaaagttttccggcgcgacgtggttaatttcaatataaacaaacggtccggcgcttaagaaactgaacatcccggcaaagctgaaaccactggcaagcatgtagctcaggacacgtttatggcggaacagcgccgcaaagttaccaatagtggtacgaatgtgaaatggctgacgacgctccggtggtaaggtttctttaatcaggaagaaaatcattgcgctagccagaatcgccgctaatgccaggatccagaagatgtaatgccagctcagccacaccagcacccagccgccaactatcggtgccatcagcggtgcaatggttgtcaccagcatgacaaagctcatcatccggctgaactcttctttcgggtaaatatcgcgcatcagggcgttaatgaccacgctggccgcagccgcagccagcccgtggaagaaacgcatcacaatcagctgatcgatggtgtttgccaacgcacacgccaccgcggcggcggcaaacaccagcgtaccgccgagcaccaccggcttacgcccgaagctgtctgccatcggcccgtagattaactgccccaacgcaaagcccagaatataagtactgagggtcatctgcgtactgcccgccggtacgccaaactgcgcactaattaccggtagcgcgggcagatacatatcaatgctcagcggcatcaacatggccagcaggccaaggataaaaacaatagcaaagctgctatgctgtcgggtggtcacaacgggctcctgaaagtcattgaaaagttagacgacgctggcaatttcttcttcagttaacggacgatattcaccgggggctaaatcagcatccagcgtaataccgccaatacgttcacgatgcagctcaaccacgtggttacccacggcggcgaacatgcgtttcacctgatgataacgcccttcgctgatggtcagacgaacctgcgttggggtaatcacttccagcaccgcaggcttagtgagatctttttcgttatgcagctgcacgcctttagcaaattgctctgccgtatcgtcagctacaggactttccagtgtcaccagataggtcttctcgcaatgatggcgcggagaagtaatgcggtggctccactgaccatcatcagtcatcagcaccagaccggtggtatcaatatccaaccgccccgccgcatgcagtttccacgctaccggttcatcaagaaaatagagcaccgttgggtgatcagggtcgtccgtggagcaaacatagccctgaggcttattgagcatgaagtaacgtggaccgtgttgctgcgccagcgggttgccatcgtaagcgacatcatgttcaggaagcagtttgaacgctgcattacggacgatttcgccatcgacggtgacacgattgccgcggatttcacgcccggcaatagcacggctaacgccgagttgctgtgcgataaatttatcaagtcgcatgtgtgtgattttgcctgtaaaaacggaggtcgggcattgacccgaaaatctgaactgttgtctgcccagtatagcggtctaataacatccctcaagggaaaaagatccatggcatactattagcagaataatctacctacgcgagaccatgatttttacacttcgcccatatcagcaagaagccgtggatgccacgctcaaccattttcgtcgtcataaaacccctgccgttatcgtgctgcccaccggcgcaggtaaaagcctggtgatagcggaactggcacggctggctcgtggtcgcgtgctggtgctggcacacgttaaagaactggtggcgcaaaaccatgcaaagtatcaggcgctggggctggaagccgatatttttgccgccgggctaaagcgcaaagagagccacggtaaagtggtatttggcagcgtgcagtctgtcgcccgtaatcttgatgcctttcagggtgaatttagcctgttgattgtcgatgaatgtcaccgtattggtgacgatgaagagagccagtatcagcaaatcctcactcacctgacaaaagtgaatccccacttacgcctgctggggctgactgccacgccttttcgattgggcaaaggctggatctaccagtttcattatcacggcatggtacgcggcgatgagaaagcccttttccgtgactgcatttatgagctgccgctgcgttatatgattaaacacggctatctgacgccgccagaacgactggatatgccagtagtgcaatacgatttcagccgcttgcaggcacagagtaacgggctgttcagcgaagccgatctcaaccgtgagctgaaaaaacaacaacgtattaccccgcacatcatcagccagattatggagtttgctgcaacgcgcaaaggggtgatgatttttgccgcgacggttgaacacgcaaaagagattgtgggattactgcctgccgaagatgcagcactgattactggcgacacccccggcgctgagcgcgatgtgttaattgaaaattttaaagcccagcgttttcgctatctggtcaacgtcgcggtactgaccaccggatttgacgccccgcacgtcgatcttatcgccattctgcgccctaccgaaagtgtgagtctttaccaacaaattgtcgggcgcggtctgcgtctcgctccgggcaagactgattgcttaattcttgattatgcgggtaatcctcacgatctctacgcgccggaagttggtacaccaaaaggcaaaagtgacaacgttccggtacaggttttctgccctgcctgcggttttgccaacaccttttgggggaaaacgaccgccgacgggacattgattgaacactttggtcgtcgctgtcagggatggtttgaagatgacgacggtcatcgcgaacaatgtgacttccgtttccgttttaaaaattgcccgcaatgtaacgcggaaaacgatattgccgcccgccgctgccgcgaatgtgacaccgtactggttgatccggacgatatgttaaaagcggcgctacgactgaaagacgcgctggtattacgctgtagcggcatgtctttgcaacatgggcacgacgagaaaggcgaatggttgaaaatcacctattacgatgaagacggcgcggatgtgagtgagcgtttccgtctgcaaacacctgcccagcgtaccgccttcgagcagctttttatccgcccgcatacgcgcacaccgggcatcccgctgcgctggatcaccgccgccgatatcctcgcccagcaagccttattgcgacacccggattttgtcgtcgcccgcatgaaaggccagtactggcaggtgcgtgaaaaagtgttcgattacgaaggtcgttttcgtctggcgcacgaattacgcggttaatggtagttttgattgatgtataaggcgattgagtatagaatctcgcccgcttttgcatacgcaaagcagatcacttacctgttgctgggtcgcctgtagcaggattaatttaagagagaaagaaatgtttactatcaacgcagaagtacgtaaagagcagggtaagggtgcgagccgccgcctgcgtgccgctaacaagttcccggcaatcatctacggtggcaaagaagcgccgctggctatcgagctggatcacgacaaagtcatgaacatgcaagctaaagctgaattctacagcgaagttctgaccatcgttgttgacggtaaagaaatcaaagttaaagctcaggacgtacagcgtcacccgtacaaaccgaagctgcagcacatcgacttcgttcgcgcttaattgctgaataagttgtaaaaaaccccgctccggcggggttttttgtatctgcagattatgcctgattacggtattgctattttttgcaggccagataaggcgttcacgccgcatctggcattcagaacacaaaaccgattaattgccgccagacgtccggcgctgcaattggtcgcgcaaattcggcggcgtgcctttaatggtcaaggtatcggttgctggatcccagaagatgcgttcacctaacagcatcgcatcaaagttaatagtcaagccaccgccgctaccggcaaacttcgtcaactgacgcagtgtgctacggtctgccgggaagctctcttccagttcgtagcctttttcagccgcaaactccgtgaagctcacttcgcttacgcctgccagctctttgctcaggcttttcagttcgatctcttcgcctgcctgcagctgctcattacagtagctataaacctgctggcgcacgttctgtcgctctgctttatccagttgtgcttcggcagtgaaatcatcaaccgcttgcaacagcccacggttttgcgctttcgcgtttaacccttcgctggccccgaggaaatccataaagaaatccgccactttgcgccctactcgccctttcaggaaagtgagatagcgggtggactctggattggtttcccattcggttaaatcgatacgcgcaacaatatccgcatgattgatatcaagataatgggttgggttgatgtcgagattttcgttaacgcgcatactgctcaggttgctcagaactgccaccagcaaatactccaccgccagatagcgatagtggcaaaacagcacgaatccaccgtcagcaaaaggatatttcgctaattcgtcacgcaggcggccggttgccgcgcggctaaatgccaggaagtcctcttcgccctgacgctgtaagcgcagcgtctgcgccagttcactctcttcgctaaacaagccgtaagctttatttttggcgctatagacccgatgcagttctgccaccatctcaacgacggtttctgtcggttccagcaaactatcgcgcaacaccagctcaaggttctgctcatcacgcttgataagctggtgcagagcaatctggttgatatccagactcatgataaactctcctttaagaccgggcggtattcaaccaccgccggttaagcgacgcaataaaagatggcggtcattttacagaaggcagcgtaacgagaatgatttaacgcataaaaaagcagaaaaaaaaccgttgctacggtaatatgttgccctttcatcaactaactgatttcgatttatgccacaaatttcccgctacagtgatgaacaggttgaacaattgctcgcagagctgctcaacgtactggaaaaacataaggctccgaccgacctttccctgatggtgttaggcaacatggtcactaaccttatcaacaccagcattgccccggcccaacgccaggcaattgccaactcttttgcccgcgccttacagtcctctatcaacgaagacaaagcgcactaagggaaacagataacaggttatggtaactcatcgtcagcgctaccgtgaaaaagtctcccagatggtcagttgggggcactggtttgcactgttcaatattctgcttagcctcgtcattggcagccgttacctgtttatcgccgactggccgacaacgcttgctggtcgcatttattcctacgtaagcattatcggccatttcagcttcctggtgttcgccacctacttgctgatcctcttcccgctgacctttatcgtcggctcccagaggctgatgaggtttttgtccgtcattctggcaacggcgggaatgacgctattactgatcgatagcgaagtctttactcgtttccatctccatcttaatcccatcgtctggcaactggttatcaacccagacgaaaatgagatggcgcgcgactggcagctgatgttcatcagcgtgccggttattttattgcttgaactggtgtttgcgacgtggagctggcaaaagctgcgcagcctgacgcgtcgtcgacgcttcgcgcgcccgctggccgcattcttatttatcgcctttatcgccagccatgtggtgtatatctgggccgatgccaacttctatcgcccgatcaccatgcagcgcgctaacctgccgcttagctacccgatgacggcgcgacgttttcttgagaagcatggtctgcttgatgcgcaggagtatcaacgccgtcttattgagcaaggtaatccagacgccgtttccgttcagtatccgttaagcgaactgcgctatcgcgatatgggcaccgggcagaatgtgctgttgattactgtcgatggcctgaactacagtcgcttcgagaagcagatgcctgcgctggcaggttttgctgagcaaaatattagcttcacgcgccatatgagctccggcaacactacagacaacggcatctttggcctgttctatggcatcagcccgagctatatggacggcattctgagcacccgtacgcctgcggcattaattactgcgcttaatcagcaaggctatcagctggggttattcagtagtgatggctttaccagcccgctgtatcgccaggcattgttgagtgatttcagcatgccgagcgtacgcacccaatccgacgagcagaccgccacgcagtggatcaactggctgggacgctacgcacaagaagataaccgctggttcagctgggtttctttcaatggtactaacattgacgacagcaatcagcaggcatttgcacggaaatatagccgggcggcaggcaatgtcgatgaccagatcaaccgcgtgctcaatgcactgcgtgattctggcaaactggacaatacggtggtgattatcactgccggtcggggtattccactgagcgaagaggaagaaacctttgactggtcccacggtcatctgcaggtgccattagtgattcactggccaggcacgccggcgcagcgtattaatgctctgactgatcataccgatctgatgacgacgctgatgcaacgcctgctacatgtcagcacacctgccagcgaatatagccaaggtcaggatttgttcaaccctcaacgccgtcattactgggttaccgcagcggataacgatacgctggcaattaccaccccgaaaaagacgctggtactgaacaataacggtaaataccgcacttacaacttacgtggtgaaagagtgaaagatgaaaaaccacagttaagtttgttattgcaagtgctgacagacgagaagcgttttatcgctaactgattaattataaatcagttagcgaaatatcttacttgcaatcggtgtggaaaacggtagtattagcagccacgagtcggcacgtagcgcagcctggtagcgcaccgtcatggggtgtcgggggtcggaggttcaaatcctctcgtgccgaccaaaaatcccaagaaaaaaccaacccttacggttggtttttttatatctgcaattaattcgataaacagaccgtgacacatcacagcctgtttattttctgttatcagaacgtcctgagctttcatcctatgaaattaattgctgttaaaagcattgggtacagaaaatacccatagctccatacccggagtcagtttttaaaaactgtttaaagaaatgcacaagtattgtgattgattttttagttgtttttcttgatgagaagctgatgcaaaattccgtctttataatgaaaatgatgccaaagcgaacgacaaggttgtagttttcactacatgtccatacataaaatggggtaacattcacgcgcctggtagcgttaccaacgctacgctcaaacataatgattctaataaaacctcaggagactactatgcctgaagcaacaccttttcaggtgatgattgtggatgatcatccacttatgcgacgcggtgttcgtcagttactggagcttgatcctggctctgaagtggtcgccgaagcgggcgacggcgcgagcgctatcgatctggcgaatagactggatatcgacgtgatcttgctggatctcaatatgaaaggtatgagtggcctggatactctcaatgccttgcgcagggatggcgttaccgcgcaaattattatcctgaccgtatccgatgcctccagcgatgtctttgcgctgatagacgcaggcgcagacggttatctgttgaaagacagcgacccggaagtattgctggaagcgattcgtgccggagcgaaaggcagcaaagtctttagcgaacgcgtcaatcagtacttacgtgaacgtgaaatgtttggcgcggaagaagatcccttcagcgtgctgacggagcgcgagctggatgttctgcacgagctggcacaggggctgagtaataaacagattgccagcgtgttgaatatttccgagcagacagtaaaagtacatattcgcaatctgctgcgtaaactcaatgtccgcagtcgcgtggcggccaccattctgttcctgcaacaacgcggggcacaataaaaatagcccgatagatttatcatcgggctgagatttatgacaaacgcaaaactgcctgatgcgctacgcttatcaggcctacgtggatcgatcaatttattgaatttacacaattttgtaggccggataaggcgttcacgccgcatccggcataaactaagcgcactttgtcaacagtctagcccgatggcatcaccatcgggcctctttttatttactctcctgcgggctcaaatgttgcatcgcctgcgcgatactacgttcaatcaccgcacggcgagtatcgttggcaggtaagagtttcaacatcatctcccacgcggcaacggcttcgccaaatcgctgctgctcaaaggcattaaacgcatacatgcttagcacacggatattgctatggtccgttctcaccagctgacgtagcagttcaccgccgaggcggttgtcgttgggatcagaactacgagtcaacgcttcagcgtatcccagtgcagcatcactgtttttcggatcgaggcgatacgcagtggcgtatgcatcggtggcgatactggcgttacccagcgccatgccaacgcggcccaacataatccagccttctatatctcccggatttttttgcagttgagtacgcatccccagcgcaagacggctcatctcttcttcgttgagcggatcggctttcggatccagcgccctgtccagcaacgccggagcctgtgccgtggcctgctgccagattttcacctgctgataattgccagtctggtagtagctgacgccagccacaattaacgccaccacaatacccggcagataaacaacatatccggcacgcttaccttccggcacgctttgttcaggaaacgcttccggcaccacgcgtacccgacgccggctgcgggcgtatatgacccaaccgccaatgccaatagccactactggcagcacccacagcagcacggtcagcggcgttaacggcggatcgtaagtgacgaagttgccgtaacgcgccaccatataatcgacaatctcttttttacttttaccttcctgcatcagttcatacactttctgacgcaggtcggtggcaatcatgctgttggaatcggcaatgctgttgttctggcatttcgggcagcgcagttcttcagtgagctgacggaactgttgttcctgtgcttcatctttaaactgcaacacatcgatggtcgccagcgcactgccggagatcatcagcatcagcacgcccaataaaaacctcattgtgcggcctccttactgtatttctcccacagcggcttgatctcttcttcccagacgcgaggattcagatcgcccgcatggcgatagcgaatgatgccgttgccgtcaataagaaacgtttctggcgcgccatagacaccgagatccagccctaacatgccatcgccatcaaacaggcttagcgcgtaaggattgcccagctctttcagccagctgattgccttctggcgatcgtctttatagttcatgccgaccacgcggatgccctgcgcagaaagctgattcagatattgatgttccgcacggcaggtcggacaccaggtcgcccagacgttaagcagtactggtttgccctgagtcagcacatccgcctgataaaactgccccggattgtccagactttcgagacgaaacttcggcacaggcttgccaatgagcgcgctttccagattggtcggatcatccccttcggcattacgcgccagctgccacagcagcgccgcggcaatcgccaggaagataatcaacggaattaacaatactttgcgcttcatacggcctccggcgcagttttttgcggactcacgcgcttacgatagcgaggatcaaacagacacagcagtccgcccaacgccatcatcagcccgcccgcccaaatccagcgaacaaatggtttgtagtaaagacgcacggcccacgcgccgttttccagctcttcaccgagggccgcgtacaggtcacgcgtgatgccgccgtcaattgccgcttcggtcatcatgctcccggcagtgttgtaataacgtttttccgcatacagcaccgtttccggcttgccatcgcgcgttacgccgatagtcgccacaccgccacgccagttcgggccagtcacctctttgacatcacggaaggtgaagcgatattcatgaatatcgacgctatcgccggacttcatgcgcacatcacgctcaacgctatagttctggctaaaggcaatgccaacaattgtcactgccagcccaaggtgagccgccaccatcccccaataactgaaggtggttttcgtgccgcgactaatacgtagcgcagcttccgcaattgccagcaccgcaatccagcaggccattgccaggccgagcaccgtcatcgccacaactttgctttcgaacagccacggcaacagcaggctcagcaccagcgtagagatgaaggcgataatcaataaattgcggatcttacgcgggcgatcccgcccccagcgcaccagaggaccgacaccaagcagtagcgcaaacggcaccatcagccaggtaaacatggtgttgaagaacggttcgccaatgctaatactgcccagtcccagttgcttatgcaccaacggcagcagcgtccccagcaacaccaccagcatcgcagcgaccagcaaaacattgttcgctaacagcaaagattcccggctccacagcgcattgtttacgcgactgcgaactttgtgtccacgcgcggcaaacagcagcaggctaccgccaatcaccagcaccataaaggcgaggataaacataccgcgcgccggatcagacgcaaacgcgtgtacgcttaccagcacgccggaacgcacgaggaaagtccccaacagacacaagctgaaggcactgattgccagcagtaatgtccacgctttgaagctggcgcgttgttcagtgaccgccagactgtgcatcagcgcagtccccaccagccacggcataaagctggcgttttctaccggatcccagaaccaccagccaccccagccgagttcgtaataggcccatgcggaaccgagcacgatgccgagcgtcaggaagatccacgctgccagcgtccacggacgagtaaaacgcgcataagtgctgtccagacgcccgctcagcaaagaagcaatggcaaaagcaaacgccacgctgaaacccacgtaccccatataaagcagaggcggatggaagatcagccccggatcctgcaatagcgggttaagatcgcgaccttcaatcgggaagttcggcaacgtgcgagagaacgggttagaggtaaagagaatgaacagcaaaaagccgacactgaccatccccattatcgccagtacacgggccacaatatccagcggaatacgctgactaaaaatcgccaccgcaaaggtccagccgctcatcagcagcacccacagcagtaggctgccttcatgcgcgccccaggtagccgccacgcgataccacaccggaagctgggtattggagttgctggcaacataggtgacggtgaagtcgttgaccacgaaagcattgaccagcaccagaaatgcgccagccacagacataaacagcagccaggcaaacaagcgggaagacgccatcatgcgcgcatctccgcgcgccacgccccatagcggatacacggacagcagcagcgcaattcccagcgccaggcacagcagtccgttaccaatttctggcatcatgatgctgggtccttataaacttacgtcaacttgctgggtccttataaacactcgccgggcgacggtggttagcttccatcgctttctcaacttctggcggcgtatagttttcatcgtgtttcgccagcacttctttcgcgaggatatgattgcctttttccagttcgccctgcaccacaacgccctgcccttcacggaacagatccggcaaaatgccttcgtaagagacatccacactgccttcagcatcgtaaatggtgaaggtcactttcaggctattgggatcgcgctgcacactacccggcatcaccatcccgccaacgcgcagacgctgaccgacttccggcatttgctgagtttcacgcttgccgtagagaatttcccccggcgtataaaagagatcgatattgctgcgcagcgcatatagcaccagaccgatagtcagcgccagccctgccaacacggcacaggcaatccacaagcggtttttacggcgaatattcatgcagcctcctgctgttgcgcagcacgtaaacgcgcctcacgcgcccgctgttgcgccacgccacgcagaattgcgcgatgttgcatcacgctgtgcacgaccaaaaccaccagcggaataacggtcatcaccaccgccagccagacaaaaaaggcgtaaccgcccattgcgaaaaattcattccaggaagcaaatgcaggggtcatttacggcctcttttcagtatcagttcactcacccacggacggcgtttttccatcagcaaaatcaaattacgcatccgcatcagcgtcagcgtggcagacaggagcaggaagccaaaaatgctccagcgcagcgggctacgcatcgccggatcgatactttgctgcatccgcgtacttccctgatgcagggtgttccaccactccacggagtaatgaataatcggcagattcaccacgccaatcagcaccaggatacctgccgcacggcccgccagacggcggtcgtcgaaggcgtgccacagggcaatcacacccacatacaaaaacagcagcaccagttcagaagtcagacgtgcatcccatacccaccaggtgccccacatcggttttccccatgcagagccggtaaccagggcaataaaggtaaacacggcaccaatgggggccatcgccgccaccgccaggttggccattttcatctgccagacaaggccaataaacgctgccactgccatacttgcataaatgcccatgctccagatcgccgcaggcacatgcaggtagataatgcggtagctatttccctgctgataatcagccggagcaaagccgaatccccagatccagccgacggtaagcacgaccacactggcaattgccagccacggtataaaccagccacagatttgatacagccgtggtgggatcgccagttgatgcagtgttttccacatagtttcgataccagactcgaacaaaaatcagtaatccagcgttattgaatgctgattcgtaacgctgccgccgtcgcaaaaggacttaatgtcgcggtgcctgccagcaacgcgcctaaaattgccagatacccgtcaacgggcaaatgcatagaagccgcgtccatcgcggcggtggcaaagatgagtaatgggatagtcagcggtaacaccagtatgctgagcagcacaccaccgcgcttaagtcccactgtcagcgccacgcccggtgcaccgagaaagccaagcgtaggcgttcccagcagcagcgtcagcgccatcacttgccagccataaacatccattcccagtagcattgctaccagtgggctaaggatgagtaacggcagaccggttaccatccagtgcgccatcaccttcgccagcacaacggcgggcaagggtaacggcaacaacatcaattgttcaagactgccgtcctgcaaatcgtcacggaacagtcgttccagcgccagcaaggaactaagcagcgcagcaacccagataatgcccggtgcaatacgcgccagcagttgcggctccggaccgatactgagcggaaaaagggtaattacaatcaggaagaaccacagcgggttggcgatttcggcgctatggcgaaacgctacacgcagctcaagacggaaaatgcgccagaacatcatgcggccctcgtttgcgtcagactaatgcggcgaattttactttcagcaacgttgagcggctggtgggtagtcagaatcacaatccccccctgctccgtatgctgcgccatacgctgggtcagacgatcgacaccgttaacgtcaatcgcggtaaaaggctcgtcgaggatccataacgtggcacgggtcagccacagacgcgctaaagcgacgcggcgttgttgcccggcgctgagctgatttacaggaatatcttcgaatccggcaagcccggcctgcgccagggcttccagacattgtgcggtatcgccatcgcgatgataaaagtgcagattttctaacgccgtcagccgggttttgatccccggctgatggcctatccataacaggttttgatggtagctgtcgcgtacctgatgcaagggctgcccttgccagagaacctcgcctgcgtcagggcgagacaaccccgtcagcaaacggagaagcgttgtcttccccgcgccgttgctaccggtgatttgtacccactctcctgcgttcagcgtaaaactcaagccactaaataaggttcgttcatcccgctcacaaagtaactctctggcttcaagcatacccacgcaataaccctgttaaaaacctggctcgacttcacgcatatcgggcagcttgtgcgctatccctttatggcaatcaatacaggtttgcccatctttcaccgcctggtcatgcatcttcgcggcaacgcttttctgggcggttgtatccatatactcgaagttgtgacagttacggcactcctggctgttattgtccttcatgcgccgccactcattctgtgccatcgtcagacgatgagcttcaaatttctgcggcgtgtcaataacgccaaaaattttaccatacagctctttacttgctttgagcttgcgtatcatcttcggcacaaactcgtgcggaacgtgacaatccggacaggtcgcacggacgccgctacggttgttgtagtgcacggaatccatgtattcctgatacaccgtgttgcgcatttcgtggcagctaatgcagaactcttcggtattggctttttccatcccggtgttaaagccaccccagaagacgatgccgccaacaaaaccgatcaacagcagcgtccccagcgccagacggctgggggtacgccaccatttccacaggcgcttaatcagaccaggcttacggtcagaatttcccataataacctcttatttcccgtaacctttacttggggtaaaggtattccccacgattggcgcggtatcggcctgcggtacgtgacattgcagacagaaataacgacgcggagccacttccgcgcccactttgccgtcgctgtccataaagtgagtaggactgatacgcggcgcgccagtggtgcgatagctttcgacaccgtggcactgcaagcagcgattggtattggtcgttacctgataaccttcaacgctatgcgggatcattggcggctgattcacatagttcagcggcatccgatcctgctcttttggcatccgaatggccccttcctgtgtcccggatacttccgggctctggctaaaatcgacgccattagccgcccaaaccgcgccgcttaccaccagggccagcatcgccgtccattgacacagcgctttcttcaggtcatggcttttcatgatttcgctcccgaactccattatgtcaacttttcgctccgctactccatcgtgtagttattgtaaatacatcctcagaacagacatccacgcagcgaccgcacgtcatgcaatcgcggctggtgacctgcaccgggctttgttcatccagcaccggggcacgtagcacatgcggttccgggcaaacatgaaaacaatccatacagcggttacatttctgccgatcggtggccgcaacggtaatcacacctttgctacccagcacgccatacagcgcgccaaccggacaaatgtgcccgcaccagccgtgttcaacgaccagtagatcaaataaaaacagcgcgagaataagcagcgcgccgctgccgaagcccattaccaggctacgccccatcagagaaacggggttgatccattcccaaatgagcgtgccagttaaggcacttcccaccagaatgaccaccaacagcacgtagcgaatgtggcgagggatcgtcgcagactgattgaggtcaaagcgcctgcgtaaccagttcgctaagtcggtaatcgggttcagcgggcagacccagctgcaaaataatcgctttcccgccagggcgtagagcacggtgataatcaccgcaccggtcaacgccaccgtggcaggcagatgaccactggcaagactttgcagcgtcatcagcggatcggtcagcggaacggtgtcgaataacaggctactgctgtagttgccgtgcaagatccacacaccaaaccatggaccgctcaaaaacatccccagcacgaagaactgacaaaggcgacgtaacaccagccaacggtgactgcgccaccagccttttttctccagcgcctcgcgcccggcgtcacgtttacgatttgccattgttcccctccagccagccgttacttagcttttgccattgttcccctccagccagccgaagcggtaatggtgacctaactcccctttcgccagactcagcggtaacaccttgattgccggttgttccagcacgcatactttttcgcacttaccgcaaccggtacaggcgtcgctgtgaaccgtcggcagaaagcgggcgtgcttaccggtacgcgtgttgcgctccagctccagggtgatggcctcatcaattttcgggcattcgcgataacaaacatcgcagcgcagcccctgaaagttgagacagttttcctggtccaccagtaccgccagccccatccgcgcgtcgtcgatgctttcaatctcacgatccagcgcaccgcttgggcacactttggcgcacggaatgtcctcacacatttcgcaaggaatatcccgtgcgacaaaatatggcgtgcccgcgctcagaccagaggccagcgtcgccagttttaaggtgtcgtaagggcaagcctgaacacactgaccgcaacgcacacaggcactggcaaaggcgttctcgtttatggctccgggcgggcgcaaccgcacgccagatgcgcgtgcggtttgctgttgtaaccccagcgccacacccacggcagccagcccgcctgctgtgcgaacgacatcgcgcagaaagcggcggcgaccattttgaggtttcgcactccgggacataatggcttacaccttctccagtttgaccgcgcacttcttgaagtccgtctctttgctgagcggatcggtcgcatccagcgtcagtttgttaaccaactgtgcggcgtcgaagaacggcatgtacaccaggccctgtggcggacggttacgaccgcgcgtttcaacaatgctgatcacttcgccacggcgagaaaccactttcactttgtcgccacggcgcagatcgcgcgctttcgcatccagcgggtgaataaacaggaccgcttccgggaaggcgcggtgcagttctggtacacggcgagtcatactgccggtgtgccagtgctccagaacgcgtccggtagagagccacaggtcgtactcttcatccggtgcttccgccgccggttcgaatggcagtgcgaagatcaccgctttgccatccggtttaccgtagaacttatagccttcgcccgctttcacgtacgggtcgttaccttcgctgtaacgccactgcgtttctttaccgttcaccaccggccagcgcagaccgcgcgctttgtggtagtcatcgaacggtgccagatcgtgaccgtgaccgcgaccaaaccatgcgtactcttcgaacagccctttttgcagatagaagcccagctcgcgggattcatcgttcagctgatcttccgccagttcggataccgggaatttgctcacttccggtgtggcatacagcacttcgtacagcgttttgccacgcagttccggtttcttcgccagcagatcttccggccatacttcttcagttttgaagcggcgggagaactggactaactgccagagatcgcttttcgcttcgcccggtgcctgtacctgttgacgccagaactgagtacggcgttcggcgttaccgtaagcgccctctttctctacccacattgcggtcggcaggatcaagtcggcggccagcgcactgactgtcggatacggatcggagacgatgatgaagttgcgcggatcgcgccagcccggcatacgctcttcattgatgttcggcccggcctgcatgttgttggtacacatggtccagtaaacattcagtttgccgtctttcagcgcacggtcttgtgccaccgcgtgcagaccgattttcgccggaatggtgccgctcgggatattccacttcttctcgcagatatcacggtgtttctcgttggtcaccaccatgtccgcaggcagacggtgagcaaaggtgcccacttcacgcgcagtaccacacgcagaaggttgcccggtcagggagaacggaccgcaacccggctgggaaattttgccggtcagcaggtgcaggttgtagaccaggttgttagcccacacgccacgagtatgctggttgaagcccatcgtccagtaggagatgactttcttgttcggatcggcatacagctgcgccagttgttctaactggtctttcggcacgccggtcatttcggcagttttttccagcgtatactcggcaacgaaggctttgtaatcttcaaagctcatcggttcggaggcgtcagaacccggattcttcgctgctttttccagcggatgggtcggacgtaaaccgtagccgatgtccgtcgcccctttgcgcaggttaacgtgcttgctgaagaagtcctgatttatcgcattgttttgaatgatatagttggcgatgtagttcaggatcaccaggtcagattgcggcgtaaagatgatgccgttgtccgccagctcgaagctacgatgctggtaggtagaaagcaccgccacggtgacgttctggttagagagacgacggttagtgatgcggctccagaggatcgggtgcatttccgccatgtttgcgccccacagcacaaacgcgtcagcctgctcgatgtcgtcatagcagcccatcggctcatccataccaaaggtacgcataaagccaactactgcgctcgccatacagtgacgcgcgttcgggtcgatgttgttgctacggaagcccgctttaaacagcttggacgcggcataaccttcccagatagtccactgaccagaaccgaacataccgatgctttccggccctttttctttcagggcggttttgaatttctcttccatcacatcgaaggcctgatcccaggtgattggggtaaattcgccttctttgtcatatttaccgtttttcatacgcagcagcggctgcgtcaaacggtctttaccgtacatgattttgggcaggaaatagcccttaatgcagttcaggccacggttaaccggtgcgtccgggtcgccctgacaggccaccacacgtccctgctgcgttccgaccagaacgccgcaaccagtaccgcagaaacggcacggcgctttatcccatttgatggcttcctgctgaccaacaacggcgcgggcaacgcccggcacgctgagaccggcagccgccgcagcggccgcaacggcgttagctttcataaagctacgacgactgagtttcatggtgtttcctcaccttgctcttcctgctggtgataaaccaggctcaccgccagcacgccctctacgttgcgtacactctcaatggtttggatcagcgtttcgctgtcttctgcttccaccaccacaatcaactgaccgctcggcgcgtcgctgacagcaacttcacagccgggaaaggcgttcagttgggtgctgatgtcactaattcgttcgcttttggcctgcacgaccaggctgcaaacttgccagttagtgtgcatggagatactccgcagttatggcacttaccggacagctggctgcacatgctccacatccgttgcaaagttggctattaagttgcggctggtagatcccggagagcgtcgggcgaaagataattgccattggctcacagctatcctgacagcggcggcattcaacactctgatacgccaggcacgcgtccccgatggtgaactgcaaatcccaggccctggtgtggcgcggagaaaataggctttcggggcaagcctgcgcgcaggcgtaacagaagctgcactcgttatttttgaaattaacgctcggatagccgcccgcgccgcgttgcagaatgttgttttcacaagcattaatacaggcgtcgcagcgggtgcaatgggtcagaaaatgagattcatcaccggaccagggcggacggataccgttactggctttgcgccagcgaccagtgagtatgccccgacgggatgcatcaatcttcacattgaccttccatcattaacgcgctctgaaaattgagagcgaccaaataaaccgcataattaataagccatttttatagccgctaagatattaaaggatgtgtcaaagatgcataccccgatcggggtaaaacctgtagcaggatcaaaagagtggcgggaagcgtggcaaaaacgggcttttgctcacatttcaaatggttataaatatatttatatagcgattgattcaccagagatatttctgctggtttgctctctcattagaatttaacactaaaagagcaggtaaaattgtctgaatgttctttaagttattcataaagcaaattaataaatctgatgaatatgttaaccttcagcgacatcatcggtgaaaacctataaatgaagaaggaaagcaaaaaaatgaagaccattctacctgcagtattgtttgccgctttcgctaccacttccgcctgggcggcagaaagcgtccagccactggaaaaaatcgcgccttatccacaagctgaaaaagggatgaagcgtcaggtgattcagttaaccccgcaagaagatgaatctaccctgaaagtagaactgttaatcggtcagacgctggaagtcgattgcaatttgcatcgtctcggcgggaagctggaaaacaaaacgctggaaggctggggctatgattattatgtctttgataaagtcagttccccggttagtacgatgatggcctgcccggatggcaagaaagagaagaaatttgtcaccgcgtatctgggcgatgctggaatgctgcgttacaacagcaagctgccgatcgtggtgtatacgccagacaatgtagatgtgaagtaccgcgtctggaaggcggaagagaaaattgacaacgcggtagttcgctaaactgccgtgaagtgcggcaccccgtaggtcagacaaggcggtcacgccgcatccgacatccaacgcccgagccggttgcctgatgcgacgctggcgcgtcttatcaggcctacaccgctgtgaagtgcggcaccccgtaggtcagacaaggcggtcacgccgcatccgacatccaacgcccgagccggttgcctgatgcgacgctggcgcgtcttatcaggcctacaccgctgtgaagtgctccaccccgtaggtcggataaggcggttacgccgcatccgacatctaacgcccaagccggttgcctgatgcgacgctggcgcgtcttatcaggcctacaccgctgtgaagtgctccaccccgtaggttggataaggcggttacgccgcatccgacatccaacgtccgagccggttgcctgatgcgacgctggcgcgtcttatcaggcctacaccgctgtgaagtgctccaccccgtaggtcggataaggcggttacgccgcatccgacatctaacgcccaagccggttgcctgatgcgacgctggcgcgtcttatcaggcctacaccgctgtgaagtgctccaccccgtaggttggataaggcggttacgccgcatccaacatctaacgcccgagccggttgcctgatgcgacgctggcgcgtcttatcagcatacgccacatccggcataccatgccggatgtggcgtatcattacaacgcaatatccgccacttctttttgaacgggttgcggtttcaactgcggtttcggcgtactatctgctgcctgcggcttgtcgtagttcaaccccagcacttcgctggtgtactgcaactcgcgttctgttgccgctacatcaccgttcagcttgcgtccataagacggaacgatcgctttcaacgtagcctgccattgcgggctggaaacacgatcgccaaatactttttccagcagattcaacataatcggcgcggcggtactcgcccctgggcttgcccccaggagcgcggcaatggttccttgctggtcactgacgacttcagtacccagacgcagtacgccacctttctcggcatcacgcttgataatctgcacgcgctgccccgcttgccacaaacgccagtcctcttttttcgcctgcggatagtactctttcaacgcttcaaaacgatcctcttcactcaacatcacctgactcaccagatatttcaccagatcgaaattatccagcccgacgtgcatcatcggcatcacgttagaggtggtggtggaactcattagatcccacaaactaccgtttttgaggaatttggtactgaaggtggcaaatggcccaaacagcactacgcgtttaccgtccagaacgcgggtatcgatatgcggaacgctcatcggtggtgcgccaacggatgctttaccgtaaaccttcgccagatggtgattaaccacgtccgggttttcgctaacaaggaactgtccgcccaccgggaaaccggcgtagtctttcgcttccggaatcccgctttcctgtaacagcttcagcgccgcaccgcccgcgccgataaagacaaatttggcacgaatgttctgtgcagtgccatttttcagatcggcaacggtaacggtccaggtgttatcgtcattacgctttagggcgcggacttcgctgctgagttgcaggctgaagttagatttcttctgcaaggaagcaattaactggcgggtgatctcgccgtagttcacatcggtaccaatttccgtacgcgtggctgccactttctgttgcggatcgcgcccttccatcactaacggtgcccactctttgatctgcgcgtgatcttcagagtaacgcataccgcgaaacaggctgctttgttgcaacgcggcgtaacgggcgcgcaggaaattgacgttatcctcgccccagacaaagctcatatgcggaacggtattgataaaactacgcggagtacgcagcacgccgcgctcaacctggtgcgcccagaactggcgggaaatctgaaatgcttcgttaatggcgactgctttttcaatactgatgctgccatcggcgttttgcggggtgtagttcagttccatcagtgcagaatgcccggttccggcgttattccagccgttgctactctcctgcgcgacaccctccaggcgctccaccatggtcatgctccattcaggctccagctcgcgtaaataggtccccaacgtggcgctcataatgccgccgccaatcaacagtacatcagtttcctgctcctcggacgctttcgcttttgccgccatgctaacggcattaagccccacggccatgctgaagagcatggcagtcacttttttcatcttgttaatgccttacttttagtcgctttattgcaggtgagatttgcgcggcatcaacggtaacacttaagtaacaacatttaaataatgtttataaattatattctaattttagaaacattataatttcgttgattaattatagggttattagaaatgaagggatttttagcatattgacctgacggcagcagtccgccaggtcagcgtcgtaatattatgccgtccgggcaacggcatcacggctagcggcatcgcgctcttcgcccgtcagctcgctaagttgcccattgcgcatttccagcaggcggtcggcgtggataaagtaatgatcatcatgactgatagcgaaaatagttttacccatctcctgcatcagcggcagcaacacctgataaaactcacgacggaagtgtggatcctgatccgccgcccattcatccagcaggataatatcgcgttcttctgccagcgccagcaacagcgccacgcgttttttctgccctttacttaacttcaggttaacaatacgcccgttgcttaactcaagcttatgagccattttcagctgcgccagccacttctcaaccagttgcgggttagcgggtttaccctccggccccagcagttgatcaaacagccagacatcggtaaacactgcgctaaacagtttgcgataatcttccggttgttcgccgctgacaggtttgccatccagcaagatttcgccgctttgtggctgatacaagcccgtcaacaacatcgccagcgtgctttttccgctaccgttgccgccaatcagaaacagcagctcgccacgtttgatggtgagattaatcggaccaacggaaaacgcgttatcctgataagcaaacgtcacgttacgcagctccagcgtttgccagttgggaaacgcctgcgggcgcggaaactctgctttgaaaggcgcgagcgcgaatttgttcagcttgttaaacgccacctgcgccgtcagcagcgtcggcaatgcgccaaccgcgctaagcagcggcgtacgcaggaataaaagcgtcaagctataggtcgcggcaacgttggtatcagcccaaccgaggctgttcgccatccagaacaccaggccgattgcgcccagcatcatgatgttactccagttcacggcactaagatggaaggtgtctgcgcgaataatatggtggcgatactcttgcgcatcaggaatgtagaggttgttaaacacatactcggcgcgttcccggttcagagtcagctctttgcgcccttcaagtacagtttgaaaatccgtgtacagcttgtcttcggtttcacgcagggtcgccatatgtttgtacacccgcgccaccagcacaaaaccgccccagatggtgatcgccatccagatagccgttaccagcaacattttgccgctcagcatccacagatacgccgcactaccgatagtgagaatgatcccctgcaccagttccggcagacgcacaaaagcaatggtgatattgcgcacatcgctggttaaccccgccagcaagctggcgctaccgagttgttcaatgcgctcgacgtgagtatccagaatccgcttgataaattcactacgcagtcggtaaacgaagtgatgccccaaagtggtgagcgccagttggcttccgagagtgactgccatcaacagcagcaataatcccagaaactccggcaacaccagcagactggtatccgccgtttcgataaggcgctgattgataaaagcaattaagccaatgcctaatgccgcactggcgaggcttagcgccatcacactgataaatggccagcgatactgccgccagacaagtacaagaagttccatgcagaaaacccggacaatgaattacagcccgcagtttaaacatcttcgcgcgcacagcaataataattcttatttttattcttttttacctgcctgacggaatgtcaggttgtagcggcagtcgatggtgagtggatgaaaccccgctttcaacggttgaataccgtgataaaacagccggctttcaccgccccataccaccacatcgccatgttccaacaacaaacgtttgagcggatcatttcgtttcaggccgccaaattgaaaaatcgcgggtaagcccagagaaacagaaacaattggcgcgcgcagatccggttcgtctttatcctgatgcaggctcagtttcgcgccaggagcgtagcggttgataagacaagcatctggctggaaatctggatagcccgccgccgtagccgcacgttgacataaattatgaaaactctgtggcatggcgggccacggtttatttgtttgcggatcaatggggctatagagataaccttgccgatgggtcgtccagcccagatgcccacagttggtcatcgccacgctcatggtatatcccccgggggtgaccatctggcgaaacgggctctggctggcaacgtcattaatatcgcggatcagttgctccgcagcgttaaaagcaaaacgccgtaaaattaccgcaccagccgccagtggctcttgccacggttcagcatcggcaaacagatccaacattacctctcctcattttcagcttcgcggcgcagcagttgcgctttacggctcacgccccagcggtaaccggaaagtgtgccatcaccacggaccacccgatgacagggtattatgatagccagcttgttggcggcacaggcgctggcaacggcccgtaccgctttcggtttgccgatggcgttagccagttgctgataactgacggtttcaccgcaaggtatcgtgcgcagtgcctgccagacttgttgctgaaaagcagtgccgcgaatgtccagcggtaacgtcagcggcgtatcgcgttgattgaggctggcgatcacttcacgcacatgttgctgaaacatcagatcggcaggcgcgttgtcggcagcgggaaacatctgctgcaactcgctgattagtgtcgcgtcatcatcgcccagcaatatcgcgcaaatcccccgctcgctttctgccaccaggcaacgacccagctcacaatcagccagcgcgtaacgcaccgccagattttcgccaccgtgacggaattgtttagccgtcatgcccagcgtttcgtcagctttgcgatagtaactgctgctgtcggggaatccggcgttaagaatagacgtcgtcacgctctcccctttcgccaggctttcgcgcaaacggcgagcgcgccaggcctgttgccaggctttaggcgtcattccggtagtcgctttaaacaaccgatgtagatgaaatggactcatcgccacctggtcggctaaggcttccagcgttacaggcgtttcctgttccagcagtcgacacgcgtgggtgattttatccaaccgatgttgctgggcattggctttttctggctgacaacgtttgcaggggcgaaagccagcggcgagtgcctcgctggcatttgcgtagaaggagacgttttcccgcaaagcatgtctggcgcggcaagacggacggcaaaagatgcctgtggtacgcacggcgaaaacgaattcgccgtcggcattcgggtcgcgggctaagacagattgccagcgttgatcgtcagttaagcatgtggcttttttcataatcagctccctggttaaggatagcctttaggctgcccggtcaccatcacgcaaaaaccaacaatcttgcgctttaatttttttcgctgacaaggaagcttttaaactgtggactcatccaggttttaaagctatcgccttctttggtgatcatataaaccgccagcccttcccggcgaacaacctctttagctttctccggcccgagtaccatcaagccagtatcccaggcatcggcttccagcgccgtcggagcaatcaccgtcacggataccagattgtgttcgatgggacgcccggtttgcggatcgataacatgggaaagacgtttgccgtccagttcgtaatagttacggtagctgccagaggtgctaatcccatgaccgttgatatccaccacagcctgaaccgcgttttctttatcggttggtttttgaatcgctacccgccacggcaggccttcaccgttcataccacggctgttcagcgcgccgcccacgctcaccagatagcgggaaatcccttcctgctccatcaagcgtgccaaatgatcggccgcatagccttcgccgacggtggagagatcgacatataaatccggcaggtctttttgcagatattgctgatggctctgattgatgaccgtcaggtgctgtaagccggttttggctttcatcgcatcgatctgttcctggctcggaatttgaaccggctgttgttccgggccaaagccccacagattcaccagcggcccgacggttatatccatcgcgccatcggtcttcgcgccaatgcgcaggctggtggtgacgatatcggccatcgcttcacttaccggccacgggcttaaactttggctgtcgttaaagcgcatcagcgcggaatcttttttataggtgctaagcagctgatcgtcggcgtccagttgggtctgaatcttttctttaagttcggcgctgcgtttggcgtcaatgcccgggatgctggcacgccagaaggtacccatagttttgccttcaagaacggtaacttcagtagcgtgggttttggcgggttgtggtttttgatcgcaaccaacaaagaagagcgcggcagccagcagtgccacgcgggtaaagcttatttccatacgtgattatcctcatgcgaacggtcgcaagagtacaccaaaaaactgagtttgtacgctgaaaacaatgaaaaaagggcccgcaggccctttgttcgatatcaatcgagattagaactggtaaaccagacccagagctacgatgttatcagtgttgatgccagcgtcacgagtgaactggttgtcgtccagcaggttgattttgtagtcaacgtaggtggacatgtttttgttgaagtagtaggtagcaccaacatcaacatatttcaggatatcttcgtcgtcgtagccacgacccaggtttttacctttagactgcaggtaagccagggacggacgcagaccgaagtcgaactggtactgagcaacagcttcgaagttctgtgctttgttcgcccaacccagggaacctacgcgagttgcgttgtaggtctgggtgtactgagcagccaggtagatgttgttagcgtcgtatttcagaccaccagtgtaggtttcagcacggtcgccgttaccgatgtaagcagcggtgttctgagcatcagtacgtttggagctggagatcgcaccaccgataccgaaaccttcgtaatcataagtgatagaaccgccgacgccgtcgccgttttgacgcagtgcgtcacgaccgttgttagttacgccactagtaaagccttcaccagatgggttgccgtttttaccctggtactgaacagcaaagttcaggccgtcaaccagaccgaagaagtcagtgttacggtaggtcgcgaagccgttaccacgctgctgcatgaagttgtcagaaccgtaggtgtcaccaccgaattctggcagtacgtcggtccaggaagttacgtcataaacaacgccgtagttacgaccgtagtcgaaagaacccacatcctggaatttcagacctgcgaatgccacacgggtccaggagttgttttcgttttcagcgctgttgccctggatctgatattcccactggccgtaaccggtcagctggtcagtaacctgagtttcacctttgaagccaagacgcatgtaggtctggtcgccatctacatctttgttgtcagagaaatagtgcaggccgtctactttaccgtacagatctaatttgttgccgtctttgttgtaaacttcagcagcgtttgctgcgcctgctaccagcagagctgggaccaggagggacagtactttaactttcatgttattaaccctctgttatatgcctttatttgcttttttatgccactgcatactgattaaccctcattaatcagtcggcaagtccattctccccaaaaatgcagaataatccaacacgaatatgatactaaaacttttaagatgtttcatttatcgctatagatgtttcaaaatgtaaatgcaagggaactttttaagattattgcggaatggcgaaataagcacctaacatcaagcaataataattcaaggttaaaatcaataacttattcttaagtatttgacagcactgaatgtcaaaacaaaaccttcactcgcaactagaataactcccgctatcatcattaactttatttattaccgtcattcatttctgaatgtctgtttacccctatttcaaccggatgcctcgcattcggttttttttacccttctttacacacttttcattattctgtgctaccacagaaaaactataacgcttgttaactatttcacaaataattaacatccgcataatttccagcaatctttgtttatttgcaattatttttgttgggctttttgtaggttatttgtacagcaaaatggcgcttgtacatctatttcccccaatgcaggatgataaatatcacgggagaatagagaatcatcaatcaggtaagagtctggaatttcacactgtaccctttatactgccctatcacttcgcgaagttttaacaggtcataaacacgaatgcgtcagaaagagacaacggccacgacccgctttagtctcctaccggggagcattacccgcttctttttactgttgatcattgtgttactggtgacgatgggtgtaatggtacaaagcgccgttaacgcctggctgaaagataaaagttaccagattgtcgacattacccatgctatccaaaagcgcgtcgataactggcgttacgtgacctggcagatctacgacaacattgccgcgacgacctccccctcctccggcgaaggtttacaagagacgcgcctgaaacaggatgtctactatctggagaaaccacgccgcaaaacggaagcgttaatctttggctctcacgacaacagtacgcttgagatgactcagcggatgtccacttatctggatacattgtggggcgcagaaaatgtaccgtggagcatgtattacctgaatggtcaggataacagtctggtgctgatcagtaccctaccccttaaagatctcacctccggatttaaagaaagcaccgtcagcgacattgttgatagtcgtcgtgcagagatgttgcaacaggccaacgccctcgatgaacgcgaaagcttttctaacatgcgccgcctggcctggcagaacggtcattactttacattgcgtactacctttaaccagccaggacatctggcaacggtcgtggcttttgatctgccgattaatgatttgatcccaccgggtatgccgctggacagtttccgccttgagccagacgcgacggcaacgggaaacaatgataatgagaaagaagggacggatagcgtcagtatccactttaacagtacgaagattgaaatctccagcgcactcaactctaccgatatgcgcctggtctggcaggttccttatggcaccttattgctggatacgttgcaaaacattctgctgccactgctgctgaacatcggtttgctggcgctggcgttatttggctataccacattccgccatttctccagccgcagtacagaaaacgtccccagcacggcggtcaataacgaattgcgcattttacgggcaatcaatgaagagatagtcagtctgctgccgctcggcctgctggttcacgatcaggaaagcaaccgcactgtcataagtaacaaaattgccgatcatttgctgccgcatttgaatctgcaaaacatcaccaccatggcggaacagcatcaggggattattcaggcgacgatcaataacgagctgtatgagatccgcatgttccgcagccaggtcgcgccgcgcacacaaattttcattattcgcgatcaggatcgcgaagtgctggtaaacaagaaactcaagcaggcgcagcgtctgtatgagaaaaaccagcaggggcggatgatctttatgaaaaacattggcgatgcgctgaaagaacccgcacagtccctggcggagagcgcggctaaactcaacgccccggaaagcaaacaactggcgaatcaggcagatgtgctggtgcggctggttgatgaaatacagttagcgaacatgcttgcggatgatagctggaaaagtgagacggtgctgttctccgtgcaggatttaattgatgaagttgtgcctagtgtgttgcctgccatcaagcgtaaaggtctgcaactgctgattaacaatcatctgaaagcacacgatatgcgccgcggcgatcgcgatgccttacgacgtattttgctgctactgatgcaatatgccgtgaccagtacgcaattgggaaaaatcacccttgaggttgatcaggatgagtcctccgaagaccgcctgacgttccgcattctggacacgggagaaggcgtaagtattcatgaaatggataatttgcacttcccgtttatcaaccagacccaaaacgatcgctatggcaaggcggacccgctggcattctggctgagcgatcaactggcacgtaaactgggcggtcatttaaacatcaaaacgcgggatgggcttggtacacgctactctgtgcatatcaaaatgctcgcagctgacccggaagttgaagaggaagaagagcgtttactggatgatgtctgcgtaatggtggatgttactagcgcagaaattcggaatattgtcactcgccagttagaaaattggggtgcaacctgtatcacacccgatgaaagattaattagtcaagattatgatatctttttaacggataatccgtctaatcttactgcctctggcttgcttttaagcgatgatgagtctggcgtacgggaaattgggcctggtcaattgtgcgtcaacttcaatatgagcaacgctatgcaggaagcggtcttacaattaattgaagtgcaactggcgcaggaagaggtgacagaaagccctctgggcggagatgaaaatgcgcaactccatgccagcggctattatgcgctctttgtagacacagtaccggatgatgttaagaggctgtatactgaagcagcaaccagtgactttgctgcgttagcccaaacggctcatcgtcttaaaggcgtatttgccatgctaaatctggtacccggcaagcagttatgtgaaacgctggaacatctgattcgtgagaaggatgttccaggaatagaaaaatacatcagcgacattgacagttatgtcaagagcttgctgtaacaaggtagcctattacatgaacaatatgaacgtaattattgccgatgaccatccgatagtcttgttcggtattcgcaaaagtcttgagcaaattgagtgggtgaatgttgtcggcgaatttgaagactctacagcactgatcaacaacctgccgaaactggatgcgcatgtgttgattaccgatctctccatgcctggcgataagtacggcgatggcattaccttaatcaagtacatcaagcgccatttcccaagcctgagcatcattgttctgactatgaacaacaacccggcgattcttagtgcggtattggatctggatatcgaagggatcgtgctgaaacaaggtgcaccgaccgatctgccgaaagctctcgccgcgctgcagaaagggaagaaatttaccccggaaagcgtttctcgcctgttggaaaaaatcagtgctggtggttacggtgacaagcgtctcagcccaaaagagagtgaagttctgcgcctgtttgcggaaggcttcctggtgaccgagatcgctaaaaagctgaaccgcagtattaaaaccatcagtagccagaagaaatctgcgatgatgaagctgggtgtcgagaacgatatcgccctgctgaattatctctctagtgtgaccttaagtccggcagataaagactaatcacctgtaggccagataagacgcgttagtgtcttatctggcatttgcaccgattgccggatgcggcgtaaacgccttatccggcctacgattcccattatttcaacaaattacattaaagtaggccagataagacgcgtcagcgtcgcatctggcatttgcactgaatgccggatgcggcgtaaacgccttatccgtcttagctatcccggcttttcctgaccctctcggcatataacgtcagcgtctgttttatcacatccagcgttaccggcttgctcaggcagctgtccataccggactccagacaccgctgtttctcttcagccaacgcattagcagttactccgattaccggcaacgtcagtcccaactgacgaatgcgttgcgtcaagcggtaaccatccatatttggcatgttgacgtcgctaagcacgatatcaatatgattcttgctaagtacattaagcgcatcgacgccatcattcgcggttttacattgatagcccaagcttcccaactgatctgccagcaaacgccggttaatcggatgatcatccacgaccagaatcatcatatcgtcattatcgctgaccgctttgtccgtactcggcagagcgttagcaggatcgtcgctctccatctcgatcaaataaatacgcgccaacaatgccggtagctcatgcggagcagccacactgtgtacccactcccctggcgctttctccagcggaataccaatatggcgacgacagaaggtcactaccgctctgccctgccattttttactcactacctcgtcagtgatcaacacatcttcgggagtcggttcctgcccttcgtatgttgtaacgacgatgccgctgcgctgcaaactggtttccaggaactgacagaggctcgcattgcggaccgccagccagcagcgtttaccactcaacccttccacgccttttttctgcgggtactgagcgccgtacaacggaatacgcacggtaaactggctgcccattcccggttcactatctacgctgatatcgccgtccatcatgctgatcagtttttcacaaatcgccagacccagaccggtcccctggaaattacgctgtacgcccgttccgacctggaagaagggatcaaacaagcgcaccacttctttcgccggtatccccacgccggtatcgcgaacacggatagagagataatcgccatccgcgcgaacatgcaaaactatacagccggtatcggtgaattttatggcgttactcaacaggttggagatgacctgctgtaaacgcatcgggtcgccatttaaggccactggcacatccggttcaataaagcagtacaagcctaactgcttgcgtaccaccagcggtaaatagttggcggtgatgtggttcatcacttcacgcggactaaactcacgcggttcgatcttcaactgttcgctttcaatcttgctgaaatcgagaatatcgctgataattttcaacaacaggctggaagagttgttcattgccgtcaccagccgatcgacgcctttcggtaactctttggtttgcaacagatccaggttaccgataatgccatacagcggcgttcgcagctcatgactgacggtggcaaggaacatgcttttactctggctcgcctgttccgctgcttgtgccatctcctgcaagctctcttccatcttcacgcggctagaaacatccaccagcacacaaatggccacgttttcattacgatagcggctatggacgaagctgatttgcagattggtattgttgctggtcaggacatcaacaaaattgacctgctgcccacagataatttgcgtcagtcgttggcggtcctcatgcgtaagcatattgagataggtatgcgccagttcgttacttaaaatattgacgccatcagcggtacgcaaaatgcagatacccactggcgcggaggcgacaatcttgcgattgaactgctcatgttcttccagtcgcagggcgtcgctttccgccggaatgaaaatacgtcgctcgtacatccgtgcgagagtaaacaatgcagctccggcaagcacattcagcaaaattgcgttaaggatcaacatgcgaatgcgttccagcaccttatcaaccggcacgctatacacgatgcttaggctactgggtggcagatttttcttcagcaccagctcccggaacccttccgtatagccaaaccaggagcgttcctgcatccagcgaggatcgcccttaattttactttctggtccggtaaggctaatcagggtatgaccattttcatcaagaatggtaacccccatcggcaacgtacccggtaagaaaaagttctccatccggatggtctgctcgacacccaaaagcgcctgcaaccggttcgccagataaactggcgtcaacgcgtaaaaatacccgacgccagggcgcggaccttcgctgatccagtagaggttactgccgctatcatcttgtggtgcatttcgatatttattgatgcgttcatgcaaagctttcaacgcggtatcgcgttccactggcatatcacgcagaccgaaattggccatgcagaggttatcgctgccgattaaaaatacccggtttagatcgtaagccgcagaaaaattatcgcgccagtagcgcataaaccacgccaaactctccagagaacctcgccaggtgttactcattgcggaacaatcggagtcggcaaacagcggttcaaacgcaggcacatccgcctgcgtttctcgtccacgcggggaaagcacaccgttttctgcgcttaagcgattttcggcgatgtacttcagctctttcatcacatcagaggtgcgttgaataaagcgctgagcctgatcggaactcagattaaattcctgacgaatttcgctttctcgctgatgtaacgcattaacgatgtaaaaaacggaactaaaagcaatcaacagccagagcactaacgccaatgctctgaacatgtagcggctggctttcagggttgtacgaaaagaagcaaggtatttcaaaggggcgaagctccgcctcaggtgaccgatggagtgtggttaaggtagcggtaaaagcgtgttaccgcaatgttctctcttctctggaatatgatacaccgccgagaaatcatcaccttaacctctgataatcgtcatataccggacaagactagtggatttcagcatgcattatatgaagtggatttatccacgccgcttacgcaatcaaatgatcctgatggcaatcctgatggtcattgtcccaacgcttactattggttatatcgtagaaacggaaggacgtagtgcagtcttatctgaaaaagagaaaaaactttctgccgtggtcaacctgcttaatcaggcactaggcgatcgctatgatctctacatcgacttaccacgtgaggagcgtatccgcgcattaaatgcagaacttgcccccattaccgaaaatatcactcacgccttccctggcatcggtgctggttattacaacaaaatgctggatgcgataatcacctacgcgcctagtgcgctatatcagaataatgtcggcgttaccattgccgcagatcaccctggtcgcgaagtgatgcgtacaaatacccctttagtttatagtggcaggcaggtgcgcggcgatattttgaatagtatgctccccattgagcgtaatggtgaaatcctcggctatatctgggccaatgaattaaccgaagatattcgccgccaggcctggaaaatggatgtgaggattatcattgtgctcaccgctggtttgctgataagcctgctgttgattgtccttttctcccgtcgcctgagcgccaatattgatatcatcaccgatggcctcagcactctggcacaaaatattcccactcgattaccacaattgcccggtgaaatggggcaaatcagtcagagtgttaataacctcgcccaggcactgcgtgaaacgcggacacttaacgatctgattattgaaaacgctgccgatggcgtcattgccattgaccgccagggtgatgtaaccaccatgaacccagcagcagaagttatcactggctatcaacgccatgaactggtagggcagccttactccatgttgttcgacaatactcagttctacagtccagtactggatacgctggaacatggcaccgaacatgtggcgctggagatcagttttccaggtcgtgaccgcaccattgaactcagtgtcactaccagtcgtattcataacacgcacggtgaaatgataggtgctttggtgattttctctgatttaactgcccgcaaagaaacccagcgccgcatggcgcaagcagaacgcctcgccacactgggtgagctgatggctggcgtcgcgcatgaagtacgtaatccgttaacggctattcgtggttatgtacagatcttgcgccaacaaaccagtgacccaatacatcaggaatatctgtccgtagtactcaaagaaatcgatagtattaacaaagttattcagcaattgctcgaatttagtcgtccacgccacagtcaatggcaacaagtcagcctcaatgcattggttgaagaaactctggtactggtacaaaccgccggcgtacaagcgcgggtcgacttcataagcgaactggataatgaattaagcccgattaacgccgatcgtgaactgctcaaacaggtactactgaatatcctgatcaatgccgtccaggctatcagcgcacgagggaaaattcgcattcaaacctggcaatacagcgacagtcaacaggccattagcatagaggacaacggctgtggcattgatctcagcctgcaaaaaaagatcttcgatccctttttcaccaccaaagccagtggaaccgggcttggtctggcgttaagtcaacgcatcattaatgcccatcagggtgatattcgcgtcgccagtttgccgggctacggcgcaaccttcacgcttattttaccgatcaacccgcagggaaatcagactgtatgactgctattaatcgcatccttattgtggatgatgaagataatgttcgccgtatgctgagcaccgcttttgcactacaaggattcgaaacacattgtgcgaacaacggacgcacagcattacacctgtttgccgatattcaccctgatgtggtgttgatggatatccgcatgccagagatggacggcatcaaggcactaaaggagatgcgcagccatgagacccggacacccgttattctgatgacggcctatgcggaagtggaaaccgccgtcgaagcgctacgctgcggagccttcgactatgttattaaaccgtttgatctcgatgagttgaatttaatcgttcagcgcgctttacaactccagagtatgaaaaaagagatccgtcatctgcaccaggcactgagcaccagctggcaatgggggcacattctcaccaacagcccggcgatgatggacatctgcaaagacaccgccaaaattgccctttctcaggccagcgtcttgattagcggtgaaagcggcaccgggaaagagttgattgccagagcgattcactacaatagccggcgggcaaaggggccgttcattaaagtcaactgcgcggcgctgccggaaagcttgctcgaaagtgaactgtttggtcatgaaaaaggtgcatttactggtgcacaaaccttgcgtcagggattatttgaacgagccaacgaaggtactctgctcctcgacgaaattggcgaaatgccgctggtactacaagccaaattactacgcattctacaggaacgggaatttgaacggattggcggccatcagaccataaaagttgatatccgcatcattgctgccaccaaccgcgacttgcaggcaatggtaaaagaaggcaccttccgtgaagatctcttttatcgccttaacgttattcatttaatactgccgcctctgcgcgatcgccgggaagatatttccctgttagctaatcactttttgcaaaaattcagtagtgagaatcagcgcgatattatcgacatcgatccgatggcaatgagtctgcttaccgcctggagttggccgggaaatattcgagagctttccaacgttattgaacgcgccgtcgtgatgaatagtggcccgatcattttttctgaggatcttccgccacagattcgtcagccagtctgtaatgctggcgaggtaaaaacagcccctgtcggtgagcgtaatttaaaagaggaaattaaacgcgtcgaaaaacgcatcattatggaagtgctggaacaacaagaaggaaaccgaacccgcactgctttaatgctgggcatcagtcgccgtgcattgatgtataaactccaggaatacggtatcgatccggcggatgtataacaccaaaacttgctatgcagaaatttgcacagtgcgcaattttctgcatagccgctcattctccttataaatccccatccaatttatcccttcatattcaattagttaaataactaaatccaataatctcattctggcactccccttgctattgcctgactgtacccacaacggtgtatgcaagagggataaaaaatgaaaacaaaattgatgacattacaagacgccaccggcttctttcgtgacggcatgaccatcatggtgggcggatttatggggattggcactccatcccgcctggttgaagcattactggaatctggtgttcgcgacctgacattgatagccaatgataccgcgtttgttgataccggcatcggtccgctcatcgtcaatggtcgagtccgcaaagtgattgctagtcatatcggcaccaacccggaaacaggtcggcgcatgatatctggtgagatggacgtcgttctggtgccgcaaggtacgctaatcgagcaaattcgctgtggtggagctggacttggtggttttctcaccccaacgggtgtcggcaccgtcgtagaggaaggcaaacagacactgacactcgacggtaaaacctggctgctcgaacgcccactgcgcgccgacctggcgctaattcgcgctcatcgttgcgacacacttggcaacctgacctatcaacttagcgcccgcaactttaaccccctgatagcccttgcggctgatatcacgctggtagagccagatgaactggtcgaaaccggcgagctgcaacctgaccatattgtcacccctggtgccgttatcgaccacatcatcgttagtcaggagagcaaataatggatgcgaaacaacgtattgcgcgccgtgtggcgcaagagcttcgtgatggtgacatcgttaacttagggatcggtttacccacaatggtcgccaattatttaccggagggtattcatatcactctgcaaagcgaaaacggcttcctcggtttaggcccggtcacgacagcgcatccagatctggtgaacgctggcgggcaaccgtgcggtgttttacccggtgcagccatgtttgatagcgccatgagttttgcgctaatccgtggcggtcatattgatgcctgcgtgctcggcggtttgcaagtagacgaagaagcaaacctcgcgaactgggtagtgcctgggaaaatggtgcccggtatgggtggcgcgatggatctggtgaccgggagccgcaaagtgatcatcgccatggaacattgcgccaaagatggtagtgcaaaaattttgcgccgctgcaccatgccactcactgcgcaacatgcggtgcatatgctggttactgaactggctgtctttcgttttattgacggcaaaatgtggctcaccgaaattgccgacgggtgtgatttagccaccgtgcgtgccaaaacagaagctcggtttgaagtcgccgccgatctgaatacgcaacggggtgatttatgattggtcgcataagccgttttatgacgcgttttgtcagccggtggcttcccgatccactgatctttgccatgttgctgacattgctaacattcgtgatcgcgctttggttaacaccacaaacgccgatcagcatggtgaaaatgtggggtgacggtttctggaacttgctggcgtttggtatgcagatggcgcttatcatcgttaccggtcatgcccttgccagctctgctccggtgaaaagtttgctgcgtactgccgcctccgccgcaaagacgcccgtacagggcgtcatgctggtcactttcttcggtagtgtcgcttgtgtcatcaactggggatttggtttggttgtcggcgcaatgtttgcccgtgaagtcgcccggcgagtccccggttctgattatccgttgctcattgcctgcgcctacattggttttctcacctggggtggcggcttctctggaagtatgcctctgttggctgcaacaccgggcaacccggttgagcatatcgccgggctgatcccggtgggcgatactctgttcagtggttttaacattttcatcactgtggcgttgattgtggtgatgccatttatcacccgcatgatgatgccaaaaccgtctgacgtggtgagtatcgatccaaaactactcatggaagaggctgattttcaaaagcagctaccgaaagatgccccaccatccgagcgactggaagaaagccgcattctgacgttgatcatcggcgcactcggtatcgcttaccttgcgatgtacttcagcgaacatggcttcaacatcaccatcaataccgtcaacctgatgtttatgattgcgggtctgctgctacataaaacgccaatggcttatatgcgtgctatcagcgcggcagcacgcagtactgccggtattctggtgcaattccccttctacgctgggatccaactgatgatggagcattccggtctgggcggactcattaccgaattcttcatcaatgttgcgaacaaagacaccttcccggtaatgaccttttttagttctgcactgattaacttcgccgttccgtctggcggcggtcactgggttattcagggacctttcgtgatacccgcagcccaggcgctgggcgctgatctcggtaaaagcgtaatggcgatcgcctacggcgagcaatggatgaacatggcacaaccattctgggcgctgccagcactggcaatcgccggactcggtgtccgcgacatcatgggctactgcatcactgccctgctcttctccggtgtcattttcgtcattggtttaacgctgttctgacggcacccctacaaacagaaggaatataaaatgaaaaattgtgtcatcgtcagtgcggtacgtactgctatcggtagttttaacggtagtctcgcttccaccagcgccatcgacctgggggcgacagtaattaaagccgccattgaacgtgcaaaaatcgatagtcaacacgttgatgaagtgattatgggtaacgtgttacaagccgggctggggcaaaatccggcgcgtcaggcactgttaaaaagcgggctggcagaaacggtgtgcggattcacggtcaataaagtatgtggtagcggtcttaaaagtgtggcgcttgccgcccaggccattcaggcaggtcaggcgcagagcattgtggcggggggtatggaaaatatgagtttagccccctacttactcgatgcaaaagcacgctctggttatcgtcttggagacggacaggtttatgacgtaatcctgcgcgatggcctgatgtgcgccacccatggttatcatatggggattaccgccgaaaacgtggctaaagagtacggaattacccgtgaaatgcaggatgaactggcgctacatagtcagcgtaaagcggcagccgcaattgagtccggtgcttttacagccgaaatcgtcccggtaaatgttgtcactcgaaagaaaaccttcgtcttcagtcaagacgaattcccgaaagcgaatagtacggctgaagcgttaggtgcattgcgcccggccttcgataaagcaggaacagtcaccgctgggaacgcgtctggtattaacgacggtgctgccgctctggtgattatggaagaatctgcggcgctggcagcaggccttacccccctggctcgcattaaaagttatgccagcggtggcgtgccccccgcattgatgggtatggggccagtacctgccacgcaaaaagcgttacaactggcggggctgcaactggcggatattgatctcattgaggctaatgaagcatttgctgcacagttccttgccgttgggaaaaacctgggctttgattctgagaaagtgaatgtcaacggcggggccatcgcgctcgggcatcctatcggtgccagtggtgctcgtattctggtcacactattacatgccatgcaggcacgcgataaaacgctggggctggcaacactgtgcattggcggcggtcagggaattgcgatggtgattgaacggttgaattaatcaataaaaacacccgatagcgaaagttatcgggtgttttcttgaacatcgacggcgaaggtaaccccattaatcaccagtcaaaacttttcaccagcgtcagctcgccagcattacgcatcggtacaataaatgtttcctgtttctcattgacgcttccttcatcggtgatcagcgtcagttgggcggtggttaattccgtttcgctgcgcccaccatagtagttgatatacacctgatagcgcccgtgaattggcgcgggcatggcgaaaatctcgggtccgtaccccgtcgtgacatccatatccagtgcaccactgtttttcagcacggtgttaccgtaccaggcgtgttcgccatcgggcgtaacaacgtgaaggtcgaggtcggtattgtccgtatcccagctgagaaccagccgtaaacgtgcacgaatcgttcctgtacccggcgtactgtaaaactgcattttttgtcggctttgcccatccgggctgatgacctgcacgctgttgctgccttcagtgaaaatataagggcgtgcaaaactaccatcggattcaattctctgcggcatactggcaccgttgaccaccagccggccctgctgaactttacccgccgcagcataattctttattttgccgcggatctgcgcactgatattttgatcatctgccatgttgacggagctcgccgggtaattgatgctttgactaaaactggcatcttcgccctctgccggatgccagccactgagcggtgcatcaatctcgacttcctgcacaccttcactgtgagcgacagggctaagcgccaccagtaacaacggaagaaaaatctttcgcatagcattagtccattaataattgtcgggtcagcgtttcgatatagttctcatcaagcccggtgggataaccatcaaaggccaggtgcagatactcatgggttaaatccagccgatcctgaagcgtaaagaagttacgaataaacagccgtttctgctgccgatcggtataggggaaaccactgactaaacggcaaaccgcaaacacgtctggttcgttgtaccccgtctcagcttgtaatatacgccgccactgcggcatttttttcgccagccaggctttcgctttgggtaataactggcaggtactgcgtggcgctccccagcggctaagactgttgtcgggataagcaaacgcgagtatctgatcgtaacgctctccctgccccgcctgggccgtggcttgccgccaggaaagtgtcccttcggtagcgcgactgccatgataatgaaccggatcgcctgcatagatgagatcctgcgtccaggcggtcatcgttcgcgcccccgtggtcgctgggctagcagaaacacgctgcgtggcgctgctgtcggggatggtcaggcaatcgccttcccgattggcgttttgctgtaaaaaagtgcgaatcgccacggtcatggctttcgctgcctcagggggcgtacttttcgcctcgcgatccagaactctggcaacgtactcttcacgatcgagatggctctgcaatttcagtttgcccttttcgctcagtaaggtcgtctcaccgtggctgacaaacgtaatgtggttaccattagtaaacgtcacacgatagcgcccattaagtacgccgggatttactgccgtcgtactcttttccgctgtgattttcttcagcggatagcgggcaaacagctccacctctacacattgcccactggcaacctgcgtcggtactggcaaaacccgattaagcaccgtcgcataacgggttagtaccgttttgctggtgccactgccagtaacccacagcggtgtaccatcggttaaccagccagcaaaaccaccctgacggatttcctgtttatcatcggcaaaccagctccaggttttcacccgtacccgactaccgagcatggatgcgacaccgattttcgcctcgtccagcaccacatccagtaagacttcctgagctttgttttgcgcgggtaacgtcgctaaactatcaagcaggcttttaaccgttacgctggtttctggcttcagcgtagtcagagacgctaaccacgcaggtgcctgacgctgttgccagtattgcccccacacatctgcgccaatatgcaaccgctgcggcgcaaaatagagcccacaggaacgtaccagcgcggtatcgcgcgttatgctctccccagcctgacaacaataaacctcttccggggagtttccgcgacactggtagggctgctccggttgatgggtatcctccagccaggcgtaaacatacagtttccacaaactccctaacggcgtggtgaggctgtcaggtaatgcactgactttggtcacgccactactgctcagctgatacagttgatcgtgctgcgcaccgcgcagcaccagttgtaacggcgtctcctccgcaagtgttggcagagtaaccaacgccaatagccagacgattcagcgccagttcacttatttcacctgcatcccggtccattcactccctgccgcaacactttgctgcgcaggtgcataggaacgcacataacgagcaggaggcagaacgaattgccctttttgcgagaagcgcagcaaatggcggaaagtgaccgttcccgtcagttctttcaccggcaccatataggccagttcgcccatttcatttcgcgctttttccagcaattgcccctgctgtttcgcggcgttgggtttattgaccgaaatgccccatgttgtgcgctcaacgtcggctcccggtggcagcggtacttccacctgaccgtagcgcagaactgcatcctgctcgctggtaagcgtgatttcatcgagatacagcgcatcgctgtcaatctcattgctggtcaccggttgcagaataaagctcatctcttcttcaccagggataagccgatacaactggcgttcaacggtcaccggaatgttactttgttgagccatttttgccggctcacgtcagcggacctgcacattttgcggcgataattcgtcaccaaaagagagaatgtccggcacgccctgaccaacccaacgccagtcttcgccccctccagttaacttatgtttagcccatgcgcccgcaggcgcaggcaaaacaactggaggcattgtcgccatatatttcgccagccagttcatggccagcgcgcgctcaatagtggattgctcagcggtcaaaccacttaaaatagcggccgtctgggtagcgtcgccaccgctattaagcagcacaaccgtgtgcgccagcggctgattgctgtttgccgctttatcccacgcatattgctgaacctgtggcatcaccgtggacttcaactgcgcttttttcagcaacgtcatggttaagacgtttgccaccgcatctgccagtggagactccggtgtatcgaggatcaggctatcattgatatcgcgggtgtcttcctcagagaaatcttcagttttagttccgcgccgggcgatagcttcatccaaccctttcaacaacgttttgcacggcaaattcatctcctgcgcccatgccagcaccagcgcccgatgcaataacggcatgttatctgcctgctccgcgtagctgtcgagcatatgctgccagtattccggttgttgcgttacgccgatcgcctggctggcctgccagtcggcgtaccatgcccatgccgtaaggaaggcgtcaccattgccatcttcaccccaccaggtaaagcgcgctccgggccccgccagttgcatcagccgcagacggttatcctgaatcatctgacgaatgtcgttagcggcggcactttgatgatcggcaagcgaacgccaggcgagactgagcgggatcagacggctaccggtgttgattacgccaccccacggttcatcgactaacgcatcaagattgttgcggaaaatctcctgcggcgtttcactactttgtagccggatattgctcgcctgctcgggcaacatcagcgcgttatcgccaccaccgagcatgacatttttctgctgttcaacgggccagctgttatccacaaaagacagttttgtgctaatgctgtcctgcacttgcccattttgttgcagttctgcacttaacaagccagattgctgaatattctgcgtcagcgaaatataattcgcccctttgtgcagcgtcagcgtctggcgcatctcagcgcctgcaaatttagtcaccagcgccaccggttcgttatcctgctgactgaagataaatagtcctgccgccggtttgtcgcccacgcgatacaccgttggcatactccacttcatgtagagatttttttccgaacgcagataagcacgcccctgcccgaccagcccgtcgccgttcatcccacgcgcggtgatacgccagcgggttaacgaatcaggcatcaggaacgtgaaatacgctttgccttgtttatcggttgtgagtgacggcatccatgccgcggtatccacctcttcacgccgtggacgttcaagcatttttactcgccgctcgctgcggttagttgcgccaggcgcaaccggctcgctggagagcgcctggtcgtagctgataaacgacagactggagctggtacgcacattgttacgccccagcggatagaaaaatttgccgatattcggcgcgatttctggttgcagcgcgtagatcatttcatcgaccacgcctaccgttagctgcgcagaaacaggtttacctttcagcgacgaggttaattcgacattgaccagttcaccaggctggtaatgggttttgtccgttttcacccggatatccagctggggaacggcaactttgatcccggcgttctgaaaactgtactgaccgttacgggtatacagcaccgaaaaagtgatgttaggcgcaaaggaattgctcactggaacccgggcttcatactgggtatcgtttaaacgttgtagcgttagccagtttgccggatgcgaaagcagcgactgctgttccacgcgatcgcgttccagcgtcaataatgcttcatcaattggctccggaaaggtaatcagcatcttcgcggtttcgcctggctggtacagcgttttatccgccacgatatctaccgtaccagtatgcgccgtgctgcccttaccgctgacggcatgacttaacccagcgagaattaagccgtctttatcgcgtaatgtcagattgtagttgccaggtttagcgaaattgacggtaaaggatttgccgcctgacggtagctctccgctatggctcgtgcggtcttcgagacgcaaccattcatacgtaacaggaacctgttttgaagattccagcgcggcataacggaacacaaccgactcgccgctattactgtattgtgcggcagtacttaatgagtaatgcgccagaccgcgttcaatgaggatctctttggtggtggtgacgcgatacgccgcgccgtcactggcggagacggttaacaaatagcggctcggtttatcggcggcggggagatttaacgccacatgaccgctggcgtcggacaccgtttcgctgccttccagcgacacggggaaacgtccggcataacgcaaatcgttaccgaccattgataattgctgagcgcgcaaacttaactgcacgcgggcattttttaccggctcgccatccgggtagagcagttgcagtttgccgctgaccgcttcgccagttttgaactcttttttggcgagagctaaaccaatctcgaaatgtggcttgatgtagtttgccacgcgaaaactgctgctatagacctgattgcggtaagcaagacgtaactcataacctccggctacgacattttctggcaggcggaaacttccctgcccgccattgcgcgcatccagcgtgacattgacggtttgcaacagactgccgttggcgtccagcaccgaaagcttcgccggggcgctgacgatgggggatgaatgcaacggatcgtggaactcgcggccgatcactttaacatcgacacgatcgcctgcgcgatatagcgggcgatcggtaaaaatatacaagcgggtgttgtagatttcgctttcgtagaagaagttctcggagacaaaaacgccgccttcagcatccttacccagaatgtatgaacgttctggcgatatatgttgtaactgcaaggtaccgctgtcatcggtcacaccgcgggtcatcacgccaagaccgtcagtccacaagatctctgagccgggcttcgcttcaccctgttttttacccgcggtccacaccagaagctctttgcctgacactttgctaagcgccacggtatcggaaacaaacaccaccgtcgtcgcccgatacccaccaaccatcgcctcgacgaggtacagtcccggctcttgttggccgagaggaatataaatgttacccggctgcggcgagatgaaattgctggatgcgccttccagttttaccccttgctgcggctcgaacggtttagcctgccatagtggataacggaactgtttcaccaggggatattttttcagcggggaaaactggttgttctgtacataacgggaaggtttaataatggcattgccgagctgtaattcgggtaacgcctgagtcacattctgccgtgactgagaagagaaagtacgctgcatcacgcggcgagatttgccgtaccagttatcccacagccaggttagcgtattgttcagcccgtcgcccagatattgcggttgcaccacaatgcgatgcaggtttttctgctggcgcaaaaatgccatcgggtcaggaatacgatacaggcgaacgtccacgccgccgtactcttccatctgatagcgccgataatcacgccccggcgcttccagtcgcactttcgcctcttcactgctgctaaaactgctgtcagcaagcaaaaagaatgttcccccggcaggcggcgcatagttgctggaaggaagcgaatcatcagcattagcaagccctgttcccacaagagacagggacaagcacgctgttatcgcgccagaaaatttaaacgataaatgccaatgaaattgggattggaatcgttgggtatccatcgggtgtccttccatgtcataagttgttgcagactgactgcgcgcattccgttgtcagttttcgtggcgcttccggtgtggtagatgacgtaacgccccatccagaccattaagtgctgggcatcgccctgatcgaaaaaaatcatatcgccaggcagcgcctggtttatgtcctggccaataaactggctgttgtactgaatcaaattaatcgcggtcacataggggccggttttcccgttcccctgattccagttttgcgccagttgacgctgttcaggtgttagcgtcatctctggcggcaaatactggctagataaaccgttactttttagccatttactgtcgtgaactttcagcgtctcgttcgccgcaaatcgcaccaggcccgcacaatcctgctgataccagcgtggacttggcccctggcggagctgttcttgtgcaatgcgtacaaaccaggcgcgaaacagcccggattgttcgacattcagcatttcgctatgggcaacaacacaacacagccagcaaatcagcgccagcagcccgtgcctcatagcggctgccaggttatgggtagccactgccaggcggcaccgggttccatctgggccagcttcatgacataacgcggttgttgagataaagcgtccagcttcggcattaataaagtttgtgcggcgttataaaaaaccggttcgagattcttcggcagactggtcaacgtttcgttacgcagcagtttcgctattccttgtggattgatatagagcggaacgatgccatcagtgggtattacatccaccattgccgggcgggttttattcagtgtttgcagcgcgttattaaccagcgtgtcatcgagggagaaaagcagcgttttgttttgcatcgccaggctcacacggaaaaaataatcgctcattaattgatcgggttgcgccgcctgcgctttcggatactggccgtatcgggaactcacttcgcgacgccagatttgcgcttcgccctgctgagtctggcttaccggcaaaacaccttctggcgctttgctttcgtgcgcaccaatattttgcgtaaacagtttccctggcaattgcgcctgttcggcagtgccatcaaactgaccgacaaacagcggggtttgcaatttactgtcttcataccagcacagccccgcggcaccgtctaacgccccattcagcttgtcgttttcctggctgatgtggctaagcatctcttcggcaataccgtgactatacggcaccgccacacagaagctggctccggcaggcatactgttccataccggcgtaaaatcgaaactggcatctacgctggcggattcatcatttaacgccacaaaactgtgccagccgtcgttacccatttcgaagcgtacgccagcaaaagaaggcattaaccgctggtagccaaaccccagccacctggcgctgactacgatgcgctggcgtactggcgttttttcggcagtacgctcttccaggccaaagcttgcttgccagcgttttttgccgctcaacaaatcacctgcgatcgccgtggcttcggtatcctgctgatcatctttaaacaacatatccgtgctggaaaacaccagcatcttgtcctgataagtcgcgaacatcagggcgttattgccgttatagcgcaactgataaacaggaacagtttcactatttatcttgatgctactgatttccgttttgcttaactggctgtcgctggtagcggcaaacaacaatggctccagcagtttgcttaaaccactgcgctggatcagcaccatataatgactaagatggccttgtttatcgtgccacagcgctgcctgcgcgggctgatctaagagactgctaaagagcttatctttcagcgtgagatcgtgttcatagacaatacgacgaatgctgccttcaatgcccagacgatcggcatgattctgataatagaaaacgaaatcttcgctcagaacatcgtggagaaacggaatggtgaggagatctttgggaagctggctcagagagtcgctgtcgagaaagaggtccggctcattgagatcgatttgcagattgttgtgcaccaccagcgggctcaacgttttttctggcccactgccagcatattgcaacgcccagacgccagcggaaagcagtgctattgcgccaaaacctacaagaccatagaaccgccagcctttcgccttttttcaccactcattgccacattccttgtgtatagccagccattttttacgggcacagccaaactttaccgtgccctaatacgacaaaagcccagactttgcagcctggacttttcaattcaaacaagggagatagctcccttttggcatgaagaagtaaaattattcttcttctggctcgtcgtcaacgtccacttccggagcgatttcatcgtccccttccgcggcactgccgtcgatggtatccagatcttcctcgtcaaccggttcagcaacacgttgcagacccactacgttttcatcttccgcagtacggatgaggatcacgccctgggtgttacggcccacgatgctgatttcgctaacgcgagtacgtaccagcgtaccggcatcggtgatcatcatgatctggtcgcagtcatctacctgtaccgcgccaacaactaaaccgttacgttcggtaaccttgatggagataacccctttcgtcgcacggctcttggttgggtattccgccactgcggtacgtttaccgtaaccgttttgcgttgcggtgaggattgcgccatcgccacgaggcacgatcagagagacgactttatcgccttcacctaagcgaataccgcgaacaccggtggtgttgcagcccatcgcacggacagaagactctttaaagcgcaccactttaccttcagcggagaacagcattacttcgtcttcgccgctggtcaggtcaacgccgatcagctcatcgccgtcaaccagtttgatcgccactttaccggcggtacgcagacggttgaactcggtgaggacagttttcttcacggtaccgttagcggtcgccatgaagactttcacgccttcttcaaactcggtcactggcaggatcgcagtgatacgttcgtcctgctccagcggcagcaggttgacgatcggacgaccgcgcgcgccacgagtggcttccggcaactgataaactttcatgctatagacgcgaccacggctggagaagcacagaatatggtcgtgagtgttcgccaccagcagtcggtcgataaagtcttcttctttaatacgtgcggcagatttacctttcccgccacgacgctgcgcttcgtattcagaaagcggctgatacttaacgtagccctggtgagagagcgtcacgaccacatcttcctgggtgatcagatcttccaggttgatgtctgcgctgttggcggtgatttcagtacgacgtttgtcaccgaactgttcacgaaccagctccagctcttcacggatcacttccatcagacgatcggcgctaccaagaatacgcaacagttccgcgatctgatccagcagctctttgtattcgtcgagcagtttttcgtgctcaagaccggtcagtttctgcaaacgcagatccagaatcgcctgagcttgctgttcggtcaggtagtacagaccatcacgcacgccgaactctggctccagccattccggacgcgcagcatcgtcgccagcacgttcgagcatcgcggcaacgttgcccagctgccacggattagcaaccagcgcagttttcgcttctgcaggcgtcggcgcatgacggatcagttcgatgatcgggtcgatgttcgccagcgccacggctaatgcttcaaggatatgagcacgatcgcgagctttacgcagttcgaaaatagtacgacgggtcaccacttcacggcggtgacgaacaaacgccgcgatgatgtctttcaggttcatgatcttcggctgaccatggtgcaatgccaccatgttgataccgaaagaaacctgcaactgggtctgggagtagaggttgttgagcacaacttcaccgaccgcatcgcgtttcacttcaatcacgatgcgcataccgtctttgtcagactcgtcacgcagcgcgctgatgccttccacgcgtttttcttttaccagttccgcaatcttctcgatcaggcgcgctttgtttacctgatacggaatttcgtggacgataatggtttcacgaccggttttggcgtcaacttccacttctgcgcgagcgcggatatacaccttgccgcgaccggtacggtaagcttcttcaataccgcgacgaccgttaatgattgccgccgtcgggaagtccggccccgggatgtgttccatcagcccttcaatgctgatgtcttcatcatcaatatacgccagacaaccgttgatgacttccgtcaggttgtgcggcgggatgttggttgccatacctacggcgataccggaagaaccgttcaccagcaggttaggaattttggttggcatgacgtccggaattttttccgtgccgtcatagttatcaacgaaatcgaccgtctctttttcgagatcggccatcagttcatgggcaattttcgccagacggatttccgtataacgcattgccgccgcagagtcgccgtcgatagaaccgaagttaccctgaccgtctaccagcatataacgcaggctgaatggctgcgccatgcggacgatcgtgtcatagaccgcgctgtcaccatggggatggtatttaccgattacgtcaccaacgacacgggcagattttttataggctttgttccagtcattgcctagtacgttcatggcgtaaagtacgcgacggtgtaccggcttcaggccatctcggacatctggcagcgcacggccaacaatgacgctcatcgcataatccagataggagctcttcagctcttcctcaatgttgaccggtgtaatttctctcgcaaggtcgctcatctaaccgctatccctctactgtatcccggattcaaaggtcgcaaattataacacagccgcgcagtttgaggtaaacctatacgctttattcacatccaatgcctgatatactcgtttgtcttgccaattacggagtagaagtgccaatgaatgccgaaaaaagcccggtaaaccataacgtagaccacgaagagatcgctaaatttgaagccgtcgcctcccgctggtgggatctggaaggtgagttcaaaccgctgcaccgcattaacccgctgcgtctgggctatattgccgagcgtgctggcggtttatttggcaaaaaggtgctcgatgtcggttgtggcggcggcattctggccgagagtatggcgcgcgaaggcgcgacggtgaccggtctggatatgggctttgagccattgcaggtggcaaaactgcacgcactggaaagcggcattcaggtggattacgtgcaggaaaccgtggaagagcacgcggcaaaacatgccgggcagtatgatgtggtgacctgcatggagatgctggagcacgtccccgatccgcagagtgtggtcagagcctgtgcgcaactggtgaaaccaggcggcgatgtctttttcagcacacttaaccgcaacggcaagagttggctgatggcggtggttggtgcggaatatattttgcgcatggtgcccaaaggcacgcatgatgtgaagaagtttattaaaccggcagaattgctgggctgggtggatcagaccagtttaaaagagcggcatatcactgggctgcattacaacccgatcactaatacttttaaactcggccccggcgtggatgtgaactatatgctgcacacgcagaataagtgaggttgatgtttggccgcgccaatgcctgatgcgacgcttgccgcgtcttatcaggcctacaaatgctccccgtaggccggataaggcgtttacgccgcatccggcaaccgtgccgactagacagtgattaccatttcaccgtcatgctcaaaaaccctgccgtctgggcaaaatcatcactccctttctgccacgccacgctgccgcgcagggacactcgctgactgatattgcccgtgactcccacttttatttcaccccgttgcttcaccgcatcgtcactgatagtgctgccatcctcttcaatttccgtgctatggggatcgtgataataattcagatctaatgttggtatgacatgaacagcggtacgccattcgctgtgtaaacccagccgcgtctgaatatcatcaccctggctttgactcacgcgcgcacggttagcggcggtaaaatcatcctgctgcacgccctgataaatcacctgcgcctgcggttcaatcaccacaccacgccccggtaaccactgataccccgcctccaggctggcgataatcccgctgctgtggtaatgatctgtgccatcttcttgttcggaaacatcattgctaaaccacgcgtattgcagccagctatccagccaggccccttgcttctgattaccgtgctgaaaccagctacttgtcagcccaacggcataaccgtggttctggttatcggcgcgagttccggtcatattgctgcggctgtcgccctggttatcgctgtagccaccaacaatcccaagcatccactcgccatccgtgccccagcgcccgctaaacagatcgccgctaagttgcaccgtagaagtgtcttcatgttgagccagttgccccgctgctgtgtaatgataatctccgccgataacacgtaaattcagcgtctgaccatcgccacctgcgtgatcgcgtcgctccatcataaacgcctgatttgccgcccgcaggttattaagataaccgccaactttggcattcaacaccggctggtaagcaggcgtaggttccgggtcgggtgttggatcaggatccggcgtgggatcaggatcgggagtcgggtctggatcaggtgggcttggcggcgttacttcttggcttcgcagataccagtcgttgttatcttccaccagcgtgtagtcatacgctcccatattgacgtagccgctgcctgccagactgaactgcgcattgttttgaaactgcgtgggatcagctgcgaaatcaaccactttaatgcctgtgcttgtcggctcaccaatccctgtaatggagttaaccaccacagttgtgttgccagcagtattaccgttcatcaccaattgatcgcttacgctgtcatcgccgtttaattcgctatcgagcagtagcgtaccgccgccggtataatcaccgtttaccgtcagcgtatcgccagcgacgccattttgcaggctaaccgcaccggacgtattggtcagattgccattaaccgtcacgttggaaagataagtcaggctgtcagtttcaaggttggtattaagctcacctgtcaacgtcacaccatcggtggcattcaccagcgtcccatcgccgttaaatagactggcattaagggcgacggaagtatcctgcccggtcaggcgcaaaaccgtaccatcgctgatgtcgatagtgccgctggaaatagcatcaatactctgaatatcctgatccgcgccagtaacgaacgttgccccatcaccaacccacagactgctagcataaggaaggatatcagcaacatcacctttcagggtgccttcttcgacacgtaccgcgctctgcgttgtaccgctggcggtcagctccagtgtaccagcccccgttttagtcaatgtactaccctcatcctgatgctgcccgctgctgtcagccatcagtgcgccccactgcgtgtctacccccgcatcaactgccacttcaccgtcggcgcgcatttcaatatcacgtccgtggcctgccgcatcactacgcgtgtcaacgtcggaggtaatctccatcacgctttcttgttgcttatcggtaaagataacctggcggttatagtgggtatctccaagctggctgttgtcgctcaccatcagcgtaccggaggcgatttgtgttgtgcccaaataactattattgtttgccagacttacctgcccgtcgctcgcatcgaccaccacgtagacgccatctttcccgtcgccgccgatatgcaaattgtcgccacctgcaagatctaccacatcctgactgccgataaccgttccgctgctgccactgacttcaaggccatcgttgtaacttgtgccgctctgccaggtggagaaatcagagagatcgagcacaccgccgtttaacacgatgctctgcggatcgtcctggagagcggtaagatctgccgcgtcgccttccaggctaagcaccgcaccatcatcaacgactatatcgccggttagcgccatgctctgcgcccctgccagcacgtagctgccgttttgcgcaatggtgagctgaccagcaccttcgatgatgccagcaaaactgccctgattaacagtaacgttgccaccagcatcgatatttaaagtgccattctgaaagcccgtcaatgcgtgcacaaaagtttgttgggtgctgccaacgtttagctcagcctgattctgatactgatcaatactccctatcgtcagaccgtagcagtcttgcggatcgtcctggcaatgcgtatcgccgacattcatcagggagttgctgcggcccagggtaacttcaccgttttcaatctgcatctcaccagtaaagtcattgttatctgcattaagtaccagatcgccggaacctgttttggtgattaacccggtaccagcaatagagtcaacagctccgtcattctctgtattgccaataaccagcgtttttccgtcggcaatatcaaaggtaacttcacttaagccgagatacataaagccacccgccgcagaggaaggaccatctccatagcctgctgcgctattgttctcatcgactaacacgcctccgttctggctgtagctgtcatcaacagaaatatcaataagatagggagccgtcacgctattggtatatatcgccccgccataaccttcggcagtgttatttgtaaaggcagtgttatttactatcgtataaccactaggatgcttgctgtcgctattattatcggtaacatcgattgccccgccatcgccatcactgtaacttgtacttgtatatgcctggttgttatcaaaaataacatcacttaaataaacgtcattattaatggtataaattgcgccacctttgccatcattagcgatgttattgcgaaacatggcgttagtgacacgtaaatcgacggcaccagtatcgttagtaccagaagaatagattgcgccaccatagccgcctgcgacgttaccggaaaaaataacatcagtaagattcagcgtactgttttctttagcaaatatggccccgccgttattatattctcctgtaacggtgttattggcaaacagagtcattccagtttcattttctggtaatagactaaattccgctccttgttgcaaaaatacggccccaccgctggcgttattggtcatatcgctaaaaaccagccattgcccatcagcgatactccagtcctgcgtaatgccactaaggctttgcctgctggcctgacaactcgctttgacatcatatccctggcaactatcagtgaccgccgcgacaccgttagcagagaaaagagatgcaatcatactcgggagtaaagataaatactccttgcgtagaaagataatccgcatattaatctaaccatcattttctataagacggcgtatttaatcgcattatacgatatggaatatctttcttttgtaaattgttcaacccggtgcaatggctattttgttattatttgatgaataatatcagtgcgtcataattcaagttaataaccttcagggatatcagttatatttaaactaaattaaagtcatgaataattttcttataatataaggtaaattaacaaaatggcttagcatttaacaataaccgaatagaaaacaaccatttcgccatcaacaatctcttacattcgcttatatattgaccacaactgatacatcagattatgtgatgactcgtgcttagatcaatttttgcaatcattagcaaaaagattaataagccatctatatcaatttatctaacctattatgccgttcaagaaatcgccgaacagttatttttaacaaatttttctcttcccattgactttcccggacaccttgtctgacctaaggtgcgcgaaagccactttttccttcctgagttatccacaaagttatgcacttgcaagagggtcattttcacactatcttgcagtgaatcccaaacataccccctatatatagtgttctaagcagcttcccgtactacaggtagtctgcatgaaactattgcggaaagaattccaaaaacaggtacgacatacatgaatcagaatctgctggtgacaaagcgcgacggtagcacagagcgcatcaatctcgacaaaatccatcgcgttctggattgggcggcagaaggactgcataacgttagcatttcccaggtcgagctgcgctcccacattcagttttatgacggtatcaagacctctgacatccacgaaaccattatcaaggctgccgcagacctgatctcccgtgatgcgccggattatcagtatctcgccgcgcgcctggcgatcttccacctgcgtaaaaaagcctacggccagtttgagccgcctgcgctgtacgaccacgtggtgaaaatggtcgagatgggcaaatacgataatcatctgctggaagactacacggaagaagagttcaagcagatggacacctttatcgatcacgaccgtgatatgaccttctcttatgctgccgttaagcagctggaaggcaaatatctggtacagaaccgcgtgaccggcgaaatctatgagagcgcccagttcctttatattctagttgccgcgtgcttgttcagcaactacccgcgtgaaacgcgcctgcaatatgtgaagcgtttttacgacgcggtttccacatttaaaattagcctgccgacgccaatcatgtccggcgtgcgtaccccgactcgtcagttcagctcctgcgtactgatcgagtgcggtgacagcctggattccatcaacgccacctccagcgcgattgttaaatacgtttcccagcgtgccgggatcggcatcaacgccgggcgtattcgtgcgctgggtagcccgattcgcggtggtgaagcgttccataccggctgcattccgttctacaaacatttccagacagcggtgaaatcctgctctcagggcggtgtgcgcggcggtgcggcaacgctgttctacccgatgtggcatctggaagtggaaagcctgctggtgttgaaaaacaaccgtggtgtggaaggcaaccgcgtgcgtcatatggactacggggtacaaatcaacaaactgatgtatacccgtctgctgaaaggtgaagatatcaccctgttcagcccgtccgacgtaccggggctgtacgacgcgttcttcgccgatcaggaagagtttgaacgtctgtataccaaatatgagaaagacgacagcatccgcaagcagcgtgtgaaagccgttgagctgttcagcctgatgatgcaggaacgtgcgtctaccggtcgtatctatattcagaacgttgaccactgcaatacccatagcccgtttgatccggccatcgcgccagtgcgtcagtctaacctgtgcctggagatagccctgccgaccaaaccgctgaacgacgtcaacgacgagaacggtgaaatcgcgctgtgtacgctgtctgctttcaacctgggcgcaattaataacctggatgaactggaagagctggcaattctggcggttcgtgcacttgacgcgctgctggattatcaggattacccgatcccggccgccaaacgtggagcgatgggtcgtcgtacgctgggtattggtgtgatcaacttcgcttactacctggcgaagcacggtaaacgctactccgacggcagcgccaacaacctgacgcataaaaccttcgaagccattcagtattacctgctgaaagcctctaatgagctggcgaaagagcaaggcgcgtgcccgtggtttaacgaaaccacttacgcgaaagggatcctgccgatcgatacctataagaaagatctggataccatcgctaatgagccgctgcattacgactgggaagctctgcgtgagagtatcaaaacgcacggtctgcgtaactccacgctttctgctctgatgccgtccgagacttctagccagatctctaacgccactaacggtattgaaccgccgcgcggttacgtcagcatcaaagcgagcaaagacggtattttgcgccaggtggtgccggactacgagcacctgcacgacgcctatgagctgctgtgggaaatgccgggtaacgatggttatctgcaactggtgggtatcatgcagaaatttatcgatcagagcatctctgccaacaccaactacgatccgagtcgcttcccgagtggaaaagtgccgatgcagcagttgctgaaagacctgctcaccgcctacaaattcggggtcaaaacactgtattatcagaacacccgtgacggcgctgaagacgcacaagacgatctggtgccgagtatccaggacgatggctgcgaaagcggcgcatgtaagatctgatattgagatgccggatgcggcgtaaacgccttatccggcctacggctcggtttgtaggcctgataagacgcgccagcgtcgcatcaggctccgggtgccggatgcagcgtgaacgccttatccggcctacggctcggatttgtaggcctgataagacgcgccagcgtcgcatcaggcacaggatgcggcgtaaaatgccttatccggcattaaactcccaacaggacacactcatggcatataccacctttagtcagacgaaaaatgatcagctcaaagaaccgatgttctttggtcagccggtcaacgtggctcgctacgatcagcaaaaatatgacatcttcgaaaagctgatcgaaaagcagctctctttcttctggcgtccggaagaagttgacgtctcccgcgaccgtatagattaccaggcgctgccggagcacgaaaaacacatctttatcagcaacctgaaatatcagacgctgctggattccattcagggtcgtagcccgaacgtggcgctattgccgcttatttctattccggaactggaaacctgggtcgaaacctgggcgttcagtgaaacgattcattcccgttcctatactcatatcattcgtaatatcgttaacgatccgtctgttgtgtttgacgatatcgtcaccaacgagcagatccagaaacgtgcggaagggatctccagctattacgatgagctgatcgaaatgaccagctactggcatctgctgggcgaaggtacccacaccgttaacggtaaaactgtgaccgttagcctgcgcgagctgaagaaaaaactgtatctctgcctgatgagcgttaacgcgctggaagcgattcgtttctacgtcagctttgcttgttccttcgcatttgcagaacgcgaattgatggaaggcaacgccaaaattattcgcctgattgcccgcgacgaagccctgcacctgaccggcacccagcatatgctgaatctgctgcgcagcggcgcggacgatcctgagatggcggaaattgccgaagagtgtaagcaggagtgctatgacctgtttgttcaggcagctcaacaggagaaagactgggcggattatctgttccgcgacggtagcatgattggtctgaataaagacattctctgccagtacgttgaatacatcaccaatatccgtatgcaggcagtcggtttggatctgccgttccagacgcgctccaacccgatcccgtggatcaacacttggctggtgtctgataacgtgcaggttgctccgcaggaagtggaagtcagttcttatctggtcgggcagattgacagcgaagtggacaccgacgatttgagtaacttccagctctgatggcccgcgttaccctgcgcatcactggcacacaactgctgtgccaggatgaacacccttcccttctggcggcgctggaatcccacaatgtggcggttgagtaccagtgtcgcgaaggttactgcggctcctgtcgcacacgcctggttgcaggtcaagttgactggattgccgaaccgttagcctttattcagccgggggaaattttgccctgttgttgccgggcaaaaggcgatattgaaatcgagatgtgaattggttgtagtgccagatacaacgcttatgcgtcttatctggcctacaacgattacatggcgtagtaatacgctttcacctgctcccagtccgctttggggattggctccagatatttttccagctggcggaagtcatgattaatcgctttatcgcgacgcaagcggcgacgacttttctccaggtcaagaaaaccagcttctgcattaccttctgttttcacatagatatggcgaacataacaacagccatgctgacgattaatgctatgcattttcttaaacgccagcgccactgctttcaacatggcttgccgtacttcgtcagaataagggcttactgcatgctgggcataccagtcagcaatgctgatgaaccccgccatatcttcagtcaccagcaacgctcgccattcaccctcaattttcaccgcttcaccaaaaacgatcttcggcacgatgacaccggcccgttccagttctttaattaccgcaacctcacggacaatcgttggtcggccgaacggataacgtacggaatgaaacagatgatgcgtcatgcgctttacatacagctttttgccgttgcgctcgacgcattgcaccccgctcataccattacggcgatagttaggctcttcaacccagtcgccctctgttgcccaccagtgattaaattcgtcgtactttgcactaactgccataccctatcgcctgtcatttttattaacgacaatgactataggtggttacctgaggaaaatcttaatgaaacgtgtcgtattaatgaatttcttttgccactactagcttgacaccgcttttacccttcatttgcagcgcatagattccaccagccactaccactaatagtgcgcccagcagataaaatgtgaatttaatcaggcggatacagcgatgaattttattcgacagggattaggcatcgccttacaaccagagttaacgctgaaaagcattgcaggtgaattgtgttccgttcctctcgaaccaactttctatcgacagattagcttgctggctaaagaaaagccggtagaaggcagtccactgtttttactacaaatgtgcatggaacaattagtggcgattggaaaaatttgatatgagacaggatggcgcatgaacgccatcctgcagtaacattactctttattaagaaattttactgccttatcagggaaatcagtaaacagcccatttacacccgctttgttatacagagcatcatataactgattcacatcaggagtgtattcaggcagtttatcactccgcacggtataaggatgcactaccagtttattctgctgagcatcttgcaccatgccagtgagtttgatattacccggctggcttgtctcctcaatcaacatatggtaatccggaccaataccatctgcatattccgccacctgtttcatggcacccggcttaaacatccagtcgtagttgtaattaacccagcttccatccggctgtttctgctgcgtttcattccagtcggtataggcaatcagctgtaccagattgagctccatgcccattttgggttccagctcattcttaatacgcttcagctcatcagcatcaaaacattgcaaataaactttatcgtctttaccggtgtaaccatatttcttcagcacttccagcgtttttgccgcaatatccttcccttcctgatgatggaaccacggcgctttgatttctggataaataccgatatttttcccggtagagtgatttaacccctgaacaaattcaatctcttcttcaaaggtgtgcacccggaagtcggacttacccattgggaaacgccccggataagtctgcacttttttaccgttttcaatatcgaaaccttcggtaaatttcaagctcttaatttcatccagcgtgaaatctatcgcgtagtaacgaccgtctttgcgcgcccgatccgggaaacgatcggcaacatcagtaacacgatcgaggtaatggtcatgcagaacaaccagattgtcgtctttggtcatcaccaaatcctgttccagataatccgctccctgcgcatacgccatcgcttttgctggcagcgtatgctccggcaaatatccactggcaccgcgatgggcgatgactattttttcgttgctgtccgccgccattgcactgcttcccatgactatagtgctcatcatgatcgccatgctaaggtttttcagcgtcaatttcatgccattagcctccgttgcgttcttgcagtaattgttcatggcgacgtttttcgccaatcatcacaacaatcaacaagataaccgccagaatgctgccgccaatcattaccataaagccgccatcccagccgaagaagtccacggtgtagccaacaatcgcgctcgccgccacgctaccgcccaggtaaccaaacagcccggtaaagcccgctgccgtacctgccgcttttttcggtgccagttccagcgcatgcagaccgatcagcatcacaggaccgtagatcaggaagccgataacaatcatacaaatcatatcgacggttgggttacctgccgggttcatccagtaaacgatagtcgcgatggtcaccagtgtcataaagaaaacgccggttgccccacggttgccacggaagactttatcgttcatccagccgcacagcagagtgcccggaatacctgcatattcataaaggaagtaggcccaggaggatttatctagcgcgaaatgcttaacctctttcagataagtcggactccagtcgaggatgccgtaacgcagcagataaacgaacacgttggcgatggcgatataccacagcagtttgttcggcagtacgtactgcatgaagatttgcttcgccgtcagctcctgttccgctttttcgttatagtcgtccggataatcatttttgtactcttcgatcggcggcaagccacaggattgcggggtatcgcgcatcatcgcaaaggcgaataatgccaccagaatggcgcagaaagcaggcatatagagcgccgcatgccagtcattgaaccaggccatccccagcaggaacagcagcggcggaataccaccaccgacgttgtgcgcacagttccacacactcacaatgccgccacgttctttctggctccaccagtgcaccatagtacgaccacacggcggccaccccatcccctggaaccaaccgcagaggaacaacagtacaaacatcaccgcaatgctgctcgtcgcccatggcacaaagcccataaacaacatcactgccgccgccagaatcaaacctgcgggcaggaaaacgcgcggattgctgcgatcgcttacgctacccatgatgaatttgctaaatccataagcaatgctgatcccgctaagggcaaaacctaaatcaccgcgactgaatccctgctcaaccagataaggcatagcaagcgcaaagttcttacgaaccaaatagtaagccgcatagccaaagaatatccccaggaaaatttgccagcgcaatcgacgataagtcggatcgatctccgcggcaggtaagcgcgctttgtgtggcgctggtttaaaaatactcaacattgatagcctccgtggcccgtggtcttatttatgattaacagcctgattcagtgagagaacctgccgtttcttgagttgccgcgatgttaagaaaacattcataaattaaatgtgaattgccgcacacattattaaataagatttacaaaatgttcaaaatgacgcatgaaatcacgtttcactttcgaattatgagcgaatatgcgcgaaatcaaacaattcatgtttttactatggctaaatggtaaaaaacgaacttcagagggataacaatgaaaactcgcgacagccaaagtagtgacgtgattatcattggcggcggcgcaacgggagccgggattgcccgcgactgtgccctgcgcgggctgcgcgtgattttggttgagcgccacgacatcgcaaccggtgccaccgggcgtaaccacggcctgctgcacagcggtgcgcgctatgcggtaaccgatgcggaaagcgcccgcgaatgcattagtgaaaaccagatcctgaaacgcattgcacgtcactgcgttgaaccaaccaacggcctgtttatcaccctgccggaagatgacctctccttccaggccacttttattcgcgcctgcgaagaagcagggatcagcgcagaagctatagacccgcagcaagcgcgcattatcgaacctgccgttaacccggcactgattggcgcggtgaaagttccggatggcaccgttgatccatttcgtctgaccgcagcaaacatgctggatgccaaagaacacggtgccgttatccttaccgctcatgaagtcacggggctgattcgtgaaggcgcgacggtgtgcggtgttcgtgtacgtaaccatctcaccggcgaaactcaggcccttcatgcacctgtcgtggttaatgccgctgggatctgggggcaacacattgccgaatatgccgatctgcgcattcgcatgttcccggcgaaaggaagcctgctgatcatggatcaccgcattaaccagcatgtgatcaaccgctgccgtaaaccttccgacgccgatattctggtgcctggcgataccattagcctgattggtaccacctctttacgtattgattacaacgagattgacgataatcgagtgacggcagaagaggttgatattctgctgcgtgaaggggaaaaactggcccccgtgatggcgaaaacgcgcattttgcgggcctattctggcgtgcgcccgctggttgccagcgatgacgacccgagcggacgtaacgtcagccgtggcatcgtgctgctcgaccatgctgaacgcgatggtctggacggatttatcaccatcaccggtggcaaactgatgacctatcggctgatggctgaatgggctaccgacgcggtatgccgcaaactgggcaacacgcgcccctgtacgactgccgatctggcactgcctggtagtcaagaacccgctgaagttaccttgcgtaaagtcatctccctgcctgccccgctgcgcggttctgcggtttatcgtcatggcgatcgcacgcctgcctggctgagcgaaggccgtctgcaccgtagcctggtatgtgagtgcgaagcggtaactgcgggtgaagtgcagtacgcggtagaaaatttaaacgttaatagcctgctggatttacgccgtcgtacccgtgtggggatgggcacctgccagggcgaactctgcgcctgccgcgctgccggactgctgcaacgttttaacgtcacgacgtccgcgcaatctatcgagcaactttccaccttccttaacgaacgctggaaaggcgtgcaacccatcgcctggggagatgcactgcgcgaaagcgaatttacccgctgggtttatcagggattgtgtggtctggagaaggagcagaaagatgcgctttgatactgtcattatgggcggcggcctcgccggattactctgtggcctgcaactgcaaaaacacggcctgcgctgtgccattgtcactcgtggtcaaagcgcactgcatttcagttccggaagcctggatttgctgagccatctgccagatggtcaaccggtgacagacattcacagtggactggaatctttgcgtcagcaggcaccagcccatccttactcccttctcgagccacaacgcgtgctcgatctcgcttgccaggcgcaggcattaatcgctgaaagcggtgcgcaattgcagggcagcgtagaacttgctcaccagcgggttacgccgctcggcactctgcgctctacctggctaagtagcccagaagtccccgtctggccgctgcccgcgaagaaaatatgtgtagtgggaattagcggcctgatggattttcaggcgcaccttgcggcagctagcttgcgtgaactcggccttgccgttgaaaccgcagaaatagagctgccggaactggatgtgctgcgcaataacgccaccgaatttcgcgcggtgaatatcgcccgtttccttgataatgaagaaaactggccgctgttacttgatgcgcttattcctgtcgccaatacctgcgaaatgatcctgatgcccgcctgcttcggtctggccgatgacaaactgtggcgttggttgaatgaaaaactaccttgtagtctgatgcttttgccaacgctgccgccttccgtgctgggcattcgtctgcaaaaccagttacagcgccagtttgtgcgccagggtggcgtgtggatgccgggcgatgaagtgaaaaaagtgacctgtaaaaatggcgtagtgaacgaaatctggacccgcaatcacgccgatattccgctacgtccacgtttcgcggttctcgccagcggcagtttctttagtggcggactggtagcggaacgtaacggcattcgagagccgattctcggccttgatgtgctacaaaccgccacgcggggtgaatggtataagggagatttttttgcgccgcaaccgtggcagcagttcggtgtaaccactgatgagacgctacgcccgagtcaggcagggcaaaccattgaaaacctgtttgccatcggtagcgtgctgggcggatttgatcccatcgcccagggatgcggcggcggtgtttgtgccgtcagtgctttacatgccgctcaacagattgcccaacgcgcaggaggccaacaatgaatgacaccagcttcgaaaactgcattaagtgcaccgtctgcaccaccgcctgcccggtgagccgggtgaatcccggttatccagggccaaaacaagccgggccggatggcgagcgtctgcgtttgaaagatggcgcactgtatgacgaggcgctgaaatattgcatcaactgcaaacgttgtgaagtcgcctgcccgtccgatgtgaagattggcgatattatccagcgcgcgcgggcgaaatatgacaccacgcgcccgagcctgcgtaattttgtgttgagtcataccgacctgatgggtagcgtttccacgccgttcgcaccaatcgtcaacaccgctaccagcctgaaaccggtgcggcagctgcttgatgcggcgttaaaaatcgatcatcgccgcacgctaccgaaatactccttcggcacgttccgtcgctggtatcgcagcgtggcggctcagcaagcacaatataaagaccaggtcgctttctttcacggctgcttcgttaactacaaccatccgcagttaggtaaagatttaattaaagtgctcaacgcaatgggtaccggtgtacaactgctcagcaaagaaaaatgctgcggcgtaccgctaatcgccaacggctttaccgataaagcacgcaaacaggcaattacgaatgtagagagcatccgcgaagctgtgggagtaaaaggcattccggtgattgccacctccagtacctgtacatttgccctgcgcgacgaatacccggaagtgctgaatgtcgacaacaaaggcttgcgcgatcatatcgaactggcaacccgctggctgtggcgcaagctggacgaaggcaaaacgttaccgctgaaaccgctgccgctgaaagtggtttatcacactccgtgccatatggaaaaaatgggctggacgctctacaccctggagctgttgcgtaacatcccggggcttgagttaacggtgctggattcccagtgctgcggtattgcgggtacttacggtttcaaaaaagagaactaccccaccagtcaagccatcggcgcaccactgttccgccagatagaagaaagcggcgcagatctggtggtcaccgactgcgaaacctgtaaatggcagattgagatgtccacaagtcttcgctgcgaacatccgattacgctactggcccaggcgctggcttaaactcctttctgatgcccggtaagcatgtggttaccgggcatttttgcgtacacgattccgtgcccaatgtatgcgttgcaacgcagtgaaaattcctctgaaaacgtctcgcaaaggctgaaactggcagatgtcaaaggcctgggataaccgtaatgtcgcgtcatcataaatatcaggtgacggacaaccatgaccgaaagtacaacctcctccccgcatgatgcggtatttaaaacctttatgttcacacccgaaaccgcacgggattttctcgaaatacatttaccagaaccactgcgcaagctttgcaacctgcaaaccttacgcctggaacccactagttttattgaaaaaagtttacgcgcttactacagcgatgttttgtggtccgtggaaaccagcgacggtgacggctatatctactgcgtgattgaacatcaaagctctgcagaaaagaatatggcttttcggctaatgcgctatgccactgccgccatgcagcgtcaccaggacaaaggctatgacagagtcccgctggtggtgccgttgctgttttatcatggcgaaaccagcccttacccgtacagtctcaactggctggatgagtttgacgatccgcaacttgcccggcagttgtacaccgaagcttttctgttggtggatatcaccatcgtacctgacgatgagatcatgcaacatcggcgtatagctctgctggaactgattcaaaagcatattcgcgaccgcgatttaatcggcatggtcgacaggatcaccacgcttttggttagaggcttcactaatgacagccagctacaaacactgtttaattatctgctgcaatgcggcgatacctcccgtttcacccgttttattgaggagattgccgaacgtagtccactacaaaaggagagattaatgactattgctgaacggctacggcaggaagggcatcaaattggctggcaggaaggtatgcatgaacaagccattaaaattgctttgcgcatgctggagcagggctttgaacgtgagattgtgctggcgacaacccaactcactgatgctgatattccgaactgtcattaaaaggagagattaatgactattgctgaacggctgcggcaggaaggacatcaaattggctggcaggaaggtaaattagaaggtttgcatgaacaagccattaaaattgctttgcgcatgctggaacagggctttgatcgtgaccaggtgctcgcggccacccagctaagcgaagccgatctggcagcgaataaccactaattaacacaggcccacagccgatccccatgggcctttgatatcaataactaccttttatgcgtggcccatttttgccacttttaaacatcgccagtcgttgatccagggcatcgctgtagagcatcgtgtcaacgccaacagcgacaaagttcgctccccacgccaggcattgctgcgccatatcaggagccacagccagaaaaccagccgctttacccgcagcacggatccgccgaatactggtttcaataattcgctgcacttccgggtgcccggcgttatccgggtagcccaagctcgcagaaagatccgcaggtccaataaacacgccatcaatcccttcgacgtcgaggatttcgtccaggttatccagtgccgttttactttccacctgcaccaacagacaaaggctatcgttaacttgcgccatgtaattctcaatgcgtccccagcgcgcagcccgtgccacactggccccgacaccacgctcaccgtagggaggatagcgcgtggcagacaccacctgacgtgcctgttcggcagtatcgaccatcgggatcagtagagtttgcgcgccaatatccaggacttgtttaatcagcggtttactgccttccaccggacggatcacgggttggctggcatagggcgctaccgcctgtagctgatgataaagatcctgaatggtgtttggcgcgtgctccccgtcaatcagcaaccagtcataaccagaagtggcggcaatttctgccatataggcagtcgtactgcttaaccacagaccaatttgcacttcgcccttgcgtaaacgttctttaaagggattgcttaataatgcgttcatcgtgttccttaacctatttaatgatgtgccacgtcggtctgcgcaacagtgcgatttacacgcagagtgaaaataatcaggctaccgatgaccgccaccgctgccagcgtcagtaatcccgccgcatcgctggcaaataacgtttctgctttcacgcgcaggatcggggcaataaacccgcccactgcaccaaacaggtttacaaaaccaattcccgcagccagcgccgtaccggaaagcagttgtgtcggcatcgtccagaacactggctgcacggcaataaacccgatagctgcaacacacagcgctacgatcgccattactggagaaagcagcccggacagaccaataccaatgcccgccgccagtaatgtcagcgctgcgacattacgccgttcgccggttttatcggaatagcgcggaataagccaggtcccaaacaaggccgcaacccacggaatggcggtgaccacgctcgctgtaaagcccacttttgttcccagcaatgccgcaacctgggtcggcaggaagaaaattaatccgtaaaccgccacctgaatggtcaggtagataatcgctagttgccagactcggccattacgcagcgcatcgctcagccgagaagtcactttctgttgttcttcacttgccagttgattgataagcaacgttttttcttgtttactcagaaaacgtgcctgctccggtgtgtcatcaagccaaaagaatgtgaataccccagcaccgactgccaacaatccttcaatcacaaacatccagaaccagccgggatgccccataaatccatgcatctccaacagcgcgccggaaagcggacttcccagtgttaacgccagcggtgcgcccatatagaacagccccataatgctggcgcgattacgctgcggaaaccattggctggtgagataaatcataccagggaaaaatccggcctccgcagcacgaagcagagtgcgaactatcagaaatttcgcttcagtatcggcccatgccatggctgcgctaagaaatccccacagcagtgttgtcgtaccaatccaggttctggcccccagtttgcgcatcaaaagattcgccggaacacccagaaacgcatataccacaaagaaaatgcctgctcccagcgcataagcttcattactcaacccggtatcaatctggtaggtctgtttggcaaaaccgatattgctacggtcgagaaacgccagcacatacagcgccaacataaacggaattaaacgcacacggtttttcttcaccacggcgtcaagcaaagcggtgctcataaaaagctccttagaatatgtgggcgttaccgttgtcacagcaacgcccggagtgattagtggctgtaggggcgtttcaaattgcagtcatgattgagttcgacgccaaaaccgggtttatcaagcacacttttatgaatacgaccattcaccggaaccggctcattgagcagaatcgggtcaaactgcggacgcatcgtactacaatccgggctggtcatcaggaattcgctgaatggcgtattggtgaaggtgatcaccgcatggtgagagtaaacagagctaccgtgcggcaccaccagttgccccctggatttggcgattgcggcaatttccaccagcgtggttaaaccaccgcaccagccaacatccggctgcataatgtcgataccggtttcactaagcgtacgaaaagattgcagtgtgccgtggtgctcaccgctggtgaccatcattccgactggcgcgttgcgtttcagttcgcgataactttcatactgctgtggcggcaggcactcttcgatccatttcaggttatagggcgcgcaagcgtgggccagtttggtcgcatagttcacgtcctgactcatccagcagtcgagcattaaccagaaatcctcaccgcatttttcacgcatatccgcgaccatagcggcatctttgcggatccccgcatcgccatcatgtggcccccagtgcgtcggcattttgccaccgataaagcccatctcttttgccagatccggacgcgcacctgtggcgtagaactgaatctcatcacgaacagcgccgcctaaaagtttataaaccggaagcccgaccactttgccgaacagatcccacagagccagatcgacacaagaaatcgtattcatcaccaggccaccagagccggagtaatacagggtggcactgagcatttgatcgtggatcagtttgatatcactgacacatttaccctcaatgaaacggttaagatgtttttcgacaataaaacagcccatttcaccggctgtgctaacggcgaatccggtctggccgttttctgcttcgacttcaacaaccaacgtgccaagaacgttaatgccaaaactctggcgactctgctcgtaatcgcggtatttactcatcggggtggcaatatgatcgtctatccagtgattcgccccctggtcgtgataatcaccgccgccagcgcctttttctgctgtcgcaccgccagtaaaccaggcgcgaacctgtttaatttttggtagggtcatgatgttctccattgttaactggcttgtaagtcaaagggacttttccatcccaacagacgactaatatccctggcgcaggcaatggccttgcccgccagataatcacggtattcttcattgatttgtaagcgggtaccgaccacgctgatcgcagcggtaagctcgttattggcgttaaacaccggcgcagcgacacaacggacatcggcgtaatcttcgccgttgtcatagctccagccctgacggcgaatacgcgccagttcttcgtgaagttgctgtggatgagtaatcgttgtgggtgtcgcctgctcccagaccagcccttcgataatactttgctgtaccgctgcaggttgccaggcaagcaggcatttacctattccggagcgataaaggctaaggctttttccttcatgggaacgcacgctgatagtggcactactctccactttcaaaatgtaataagcgctgccgttatcaataatccccaggtgacataacagcccggtggtatccatcagttgcgtcaaacgcggtcgagccagttcccggagatccatcttgcttaacgcatgaccggaaagctccaccagcctggtccacaaacaaaaattttcctggtgatcaaggctaagaaaacgctgacgcctgagttcattaagcagcaaataggccgtgcttttagggattcccaatgtgtcaatgatcgtcgcagcactacaggggccaatgcgggcaatcaaattgagaatatcaatagcccgtgtcagggcgggaactttgctactttccaacatactggactccagtcttagatactggaatcagtctcgttgctcagggggagtaaaattgtgaagcgcatcaaatcccgctcctcgtccagcagactggagaaattacgcacaaatttgtgaatcagcgcacggattttttcttattgagtacaacaggttggacaaattttgccggagggggaatgtgccggtgcagtaaaccggcacagagtggcggaatcagacagataaggtcatggactcaacaacctcaatccagccatgctcactggcgatatcctggccgtttaaccaacggcgcagcatattcagtgccatcattgcgcacacttcctgacggatagccaggctgtagcgcgtagtgctgaaacgcacacgcagagcgaaagtgccgtctggcgtggctagcgcaaagttgagatgctcgttctcgaaaccgctaacagccagtgccagcccggcaaaatggttggcccgccgttctgtaatccagtgcgcagtttgcgccagggtttcctcctgactaggaaccacttcacacgccagcaatggagcacctgcgcgagaaagttgcaaagccaataaaccaccggtgaattgctcgctcaacgtcaggctgaactggcggttttgcaattcgcgactgatctgcgcgggcagtccttcagtgccttcgaaaatcacgctctgtccggcaacacgtttaacatccagccacagtttttccatcgcctgttgctcgcttgccggtccggtgagtttcagttcgatgataggcatactggagcgatagcccattgttacgcccggcggcagttgtagagtgtccaggctttgtgccagatcgctttcgctacgaccaaaagtagtcaaacgcagacaaaccggcggctgcggtaaagaaaaacgctcgcgcaggcgcggcaggatttcgtgctcgaccatcaccttaaattcactcggtacgccgggagtaaagaacatcaggcaacgattaagctgcacggcaaaaccacaggcggtgcctaccgggttattgataaattcagcactggcaggcagctccgcttgtttacggttgctcggtgccattactcgtccacgttcgtggaaatagcgttccatctctttgagccaggcttcatgcagcaccaggccttcaccttttgctgtcgcagcggcgagtgcgcttaaatcatcgctggtcggtcccagcccgccgttaacgatcagcacatcggcgtgctgactacgttcgcgaagaatggtgactaagtcatcaaggttatcccccaccgtattgcggcgagataatggcaacccctgatgaaagaaaaaatcggccagccaggcagcgttagtgtcaacgatttgcccgtgtaacacttcatccccggtggataacatttccacttttaacatggttatctcctgcttttgttatcgaatcactataacgcaaagggagataaggcgtagtaagaaactgaatggcgcgacagaatgccgcgccggaagggatcagaaactggcgttaaccccaacatacgggccgtcagccacggcgttgtcgcggttaccgtctttaccgctcagattcaggtagcgataacccgcctcaatactgactggacgcataatggtgtaacgcgcgccagcattcgcttcttcataactttgaataccgctggagaggctatccggagagtagtaatactcgccaaacaaacggaagctgttgccaattttccactgcaaaccacctcctaccgctgcggcataaccttcatcgccgtaattcgggttggtgtaaacgccttttccgccaacggtcgccattaacggcccgagaggcagattcaaccccagccccacgccagcgacatcaccgtcgtcgtcgttatgtgtccagttaccgcttaacgccaggcccgtcgtttcagtcccaaaaccgacaccaatattggtgtattctttacccgcctgaccgctgatgctcattgcattgacgcttgcagaaaccaacagcattccggccagacctgctagcgcaatttttttcattatcccctttcccacaagcaattaatcaaaattcccaaagctgcgggattgtactgcctggcacagaggattcaatgagcgaaaaaaaggatctagtcacttattgtaactaaatacttcttaaataattaaatgccgaaaaaataaacacactttatcgatacacacaaaaataataataagtacagttatcatcgcaaaagagattactgtcactttcacatatttgtgagttaccgtattctcatggtttctttttatttataaggaatatccctgtgcgacaacggactattgtatgccctttgattcaaaatgatggtgcttatttgctgtgtaaaatggccgacgatcgcggcgttttccccggtcaatgggcgattagcggtggcggcgtggagcctggcgaacgaattgaagaggcactacgccgcgaaattcgcgaagaactgggagaacagctgcttttgacagaaatcacgccgtggaccttcagcgatgatattcgcaccaagacgtatgcagatggtcgcaaggaagagatttatatgatttacctgatttttgactgcgtttctgccaaccgagaagtgaaaataaacgaagagtttcaggactacgcgtgggtaaaacctgaagatctggtgcattatgatttgaatgtcgccacccgaaaaacgttacgtttgaaaggtcttctgtaacaatgatgacagccattactggctgtcagattgaaaatttagtggttaacgaattccccatccagataaactttgcctttttccacatgcatgactaaaccatccagataatcaggtttaaatgtcgcgtcacgcttatctttagcaatatatgtcaggcaatgattatgggtgaaaataacgatatttttatcaggcgctttgctttgtaagtccttaattgcactataaatctcattaccgcactgaagaagtcgtttatctaccgtcaattttttacccgcactaaaccaggtagcgctctgaatggtccggacggtattactggaataaagatcgaaatcagggatatcagcactaaaagcgttgcccagttcacgggcatcctgggtacctttaaccgtaatacctgttttatcactcaagcattgattggtactacggtcgcaacgttcagcatgacgaaacaaaacgacaaccgggtgctgctgtgccagtctggccagtgttttattgtcgatacgtggcaaaccattgctactccaggcggcatgagtacccagtccggcaattgcagcgagcgccagtaaaatgatgatatattttttactcttcaagctagagcggcaaaaagctaacacgtaaactccacctatagacaagcgcaaccagacaattaccgtgaaattgagctacatttctggcgataattcgcagttggtgtaatattaaaaatcctacgatgtcggcaaaatgcctcaaaattttgccaaatgcaaagcctaaataagaaaaaatataaaaatttcaatatttacgtctaatattagtttcttaaggttaagttaatattctatccttaaaatttcgctccaaatggcaaaatatacacaacactctttatagcaaatataagtggacaggtattcaatggcggaaggaaaagcaatgagtgaatttttgccttttagccgaccagcaatgggcgtggaggaactcgctgcagttaaagaggttctcgaatccggttggatcacaaccggtccgaagaatcaggcgcttgagcaagctttttgccagttgacgggaaatcagcatgccatcgcggtcagtagtgccaccgccggaatgcatatcacgctaatggcgttgaaaattggcaagggcgatgaagtgattacgccttccctgacctgggttagtaccctcaatatgatttccttgttgggtgcaacgccggtaatggtggatgtcgaccgcgatacgctgatggtcacgcctgaagctatcgagagtgccattacgccacgcactaaagccatcattccggtgcattatgccggtgcgccagcagatattgacgccattcgcgccattggcgaacgttacggcatcgcagttatcgaagatgctgcccatgccgtcggtacgtattacaaagggcgacatattggcgcaaaaggtaccgctatttttagttttcatgccattaaaaatattacctgtgctgaaggtggcctgattgtaactgataatgaaaaccttgcccgccagctacggatgctgaaatttcacggtctgggtgtcgatgcctatgacagacaaacctggggccgtgcaccgcaggctgaagtcttaacaccgggctataagtacaatctgaccgatattaacgccgcgattgccctgacacagttagtcaaattagagcacctcaacacccgtcggcgcgaaattgcccagcaatatcagcaagcactggcagctctcccctttcagccattaagccttcccgcctggccgcacgttcacgcctggcatctgtttattattcgtgtcgatgaacaacgttgtggtatcagtcgcgatgcgttgatggaagcgttaaaagaaagaggcattggtaccgggttacatttccgcgccgctcacacacaaaaatattatcgcgagcgttttcccacgctgagcttaccgaataccgaatggaatagcgaacgcatctgttctttgccgctgttcccggatatgactaccgccgatgccgaccatgtcatcacagcccttcagcaactcgcaggacaataagccatgtttgaaatccaccctgttaagaaagtcagcgtggttattcccgtttataacgagcaggaaagcttaccggaattaatcaggcgcaccaccacagcctgtgaaagcttggggaaagagtatgagatcctgctgattgatgacggcagtagcgataattccgcgcatatgctggtcgaagccagtcaagcggagaacagccatattgtgtctattttgcttaaccgcaattacgggcaacatagtgcgattatggcgggattcagtcacgttactggcgacttaattattacccttgatgccgatctccagaatccgccagaagaaatcccccgcctggtggcaaaagccgatgaaggttacgacgtggtagggactgtacgccagaaccgccaggacagctggtttcgtaaaaccgctagcaagatgattaaccggcttattcagcgcaccactggcaaagcgatgggtgattacggttgtatgctgcgcgcctatcgccgtcatattgtcgatgcgatgttgcactgccatgaacgcagcacctttatcccgattctggcgaatatcttcgcccgccgtgccattgaaattccagtacatcatgccgagcgtgagtttggtgaatccaaatacagttttatgcgcctgattaatttgatgtacgacctggtgacctgccttaccacaacgccgctacgtatgctgagtctgctcggcagcattattgcgattggaggttttagcattgcggtgctgctggtgattttacgcctgaccttcggaccacaatgggcggcagaaggcgtctttatgctatttgccgtgctgtttacttttattggcgctcagtttatcggcatgggattactcggtgaatatatcggcaggatctacaccgatgtccgcgcccgcccccgctattttgttcagcaagttatccgtccatccagcaaggaaaatgaataatgaaaaccgtcgtttttgcctaccacgatatgggatgcctcggtattgaagccctgctggctgccggttacgaaattagcgccatttttacccatactgataatcccggtgaaaaagccttttatggtagcgtggctcgtctggcggcggaaagaggcattccggtttatgcgccggataacgttaatcatccgctgtgggtggaacgcattgcccaactgagcccagatgtgattttctctttttattatcgccatcttatttacgacgaaattttgcagctcgctcccgcaggtgcatttaatctgcatggtagcctgttaccaaaatatcgtggtcgcgcgccgctgaactgggtgctggtcaacggtgaaacggaaactggcgttacattgcaccgaatggtgaaacgtgccgatgccggggccattgtggcgcaactgcgcattgccattgcgccagacgatatcgctattacgctgcatcataaattgtgccatgccgcgcgccagctactggaacagacattacccgccattaaacacggtaatattctggaaatcgcccagcgcgaaaacgaagccacctgttttggtcgcagaacgccggatgacagtttccttgaatggcataaaccggcatccgtactgcacaacatggtacgtgccgttgccgatccgtggccgggtgccttcagctatgttggcaatcagaaattcaccgtctggagcagccgtgttcatcctcatgccagcaaagcacagccggggagcgtgatttctgttgcgccactgctgattgcctgtggcgatggcgcgctggaaatcgtcaccggacaggcgggcgacggcattactatgcagggcagccaattagcgcagacgctgggcctggtgcaaggtagtcgcttgaatagccagcctgcctgcaccgcccgacgccgtacccgggtactcatcctcggggtgaatggctttattggcaaccatctgacagaacgcctgctgcgcgaagatcattatgaagtttacggtctggatattggcagcgatgcgataagccgttttctgaatcatccgcattttcactttgttgaaggcgatatcagtattcattccgaatggattgagtatcatgtcaaaaaatgtgatgtcgtcttgccgctggtggcgatagccacgccgattgaatatacccgcaacccgctgcgcgtatttgaactcgattttgaagagaatctgcgcattatccgctactgcgtgaagtaccgtaagcgaatcatcttcccgagtactagtgaagtttatgggatgtgtagcgataaatacttcgatgaggaccattctaatttaatcgtcggcccggtgaataaaccacgctggatttatagcgtaagtaaacaattacttgatcgggtgatctgggcctatggcgaaaaagagggtttacagttcaccctcttccgcccgtttaactggatgggaccacgactggataaccttaatgcagcgcgaattggcagctcccgcgctattacgcaactcattctcaatctggtagaaggtagtccgattaagctgattgatggcggaaaacaaaaacgctgctttactgatattcgcgatggtatcgaggcgttataccgcattatcgaaaatgcgggaaatcgctgcgacggtgaaattatcaacattggcaatcctgagaacgaagcgagcattgaggaactgggcgagatgctgctggcgagcttcgaaaaacatccgctgcgccatcatttcccaccgtttgcgggctttcgcgttgtcgaaagtagcagctactacggcaaaggatatcaggacgtagagcatcgtaaaccgagcatccgcaatgcccaccgctgcctggactgggagccgaaaattgatatgcaggaaaccatcgacgaaacgctggatttcttcctgcgcaccgttgatcttacggataaaccaagttgacctaagatcttacggataaaccatcatgaccaaagtaggcttacgcattgatgtcgatacctttcgtggcacccgtgaaggcgtgccgcgtctgctggaaatcttgagtaagcataatattcaggccagcatttttttcagcgtcggcccggacaatatgggccgccatctctggcgactggtgaagccacagtttttgtggaagatgctgcgcagtaacgcggcaagcctttatggctgggatattttactggcaggtacggcctggccaggtaaagagattggtcatgccaatgccgatatcattcgtgaagcggctaaacatcacgaagtcggcctgcacgcctgggatcaccatgcctggcaagcccgtagcggtaactgggatcggcaaacaatgatcgacgatattgcacgcggtcttcgcactctggaagagattatcggtcaaccggtaacctgttctgccgctgcgggctggcgtgccgaccagaaggtgatcgaagcaaaagaagcgttccatttgcgctacaacagcgattgtcgtggggccatgccgttccgtccattgctcgaaagtggaaaccctggcactgcgcaaattccggtgaccttacccacctgggatgaagtgattggtcgggatgtgaaagcagaagattttaacggttggttactcaaccgcatcctgcgagataaaggcacgccggtttataccattcatgcagaagttgaaggctgcgcttatcagcataattttgtggatctcctcaaacgcgcagctcaggaaggcgtgacattttgccctttaagcgaactgttaagtgagacgttgccgctcggacaagttgttcgcggaaatattgccggacgtgaaggctggctgggttgccaacaaattgcgggtagtcgctgatgaaaagcgtacgttaccttatcggcctcttcgcgtttattgcctgctattacctgttaccgatcagcacgcgtctgctctggcaacccgatgaaacgcgttatgcggaaatcagtcgagaaatgctggcatccggcgactggattgtgccccatctgttagggctacgttatttcgaaaaacccattgccggatactggattaacagcattgggcaatggctatttggcgcgaataactttggtgtgcgggcaggcgttatctttgcgaccctgttaactgccgcgctggtgacctggtttactctgcgcttatggcgcgataaacgtctggctctactcgccacagtaatttatctcagtttgtttattgtctatgccatcggcacttatgccgtgctcgatccgtttattgcattctggctggtggcgggaatgtgcagcttctggctggcaatgcaggcacagacgtggaaaggcaaaagcgcaggatttttactgctgggaatcacctgcggcatgggggtgatgaccaaaggttttctcgcccttgccgtgccggtattaagcgtgctgccatgggtagcgacgcaaaaacgctggaaagatctctttatttacggctggctggcggttatcagttgcgtactgacggttctcccttggggactggcgatagcgcagcgggagcctaacttctggcactattttttctgggttgagcatattcaacgctttgcactggatgatgcccaacatagagctccgttctggtactacgtgccggtcatcattgccggtagcctgccgtggctgggattactccccggtgcactgtacacaggctggaaaaaccgcaagcattccgcaaccgtctatttgttgagctggacgataatgccgctgctgtttttctccgtcgctaaaggtaaattgcccacctatattctttcctgctttgcatctctggcaatgctgatggcgcattacgctttgctggcagcaaaaaataatcctctggcgctgcggattaatggctggattaacatcgcttttggcgtcactggcattattgccacatttgtggtctccccgtggggaccaatgaacacgccggtgtggcaaaccttcgagagctataaagtcttttgtgcctggagcatttttagcctatgggcatttttcggctggtacaccttaacaaacgtcgaaaagacctggccttttgccgcgctttgcccgctggggctggcgttgctggtaggatttagtattcctgacagagttatggaaggaaaacatccgcaattttttgtcgagatgacacaagaaagtcttcagccaagccgctatattcttactgatagcgtcggtgttgccgcaggtctggcatggagcctgcaacgcgatgacatcatcatgtatcgccagacaggtgagttgaaatacggccttaattatccggatgcgaaagggagatttgtcagcggtgatgagttcgcaaactggcttaatcaacatcgtcaggaggggattattactctcgtgcttagcgttgaccgcgatgaagatatcaacagtctcgccattccgcccgcagatgccatcgatcgtcaggagcgtctggtgctgattcagtatcgtcccaaatgatctggctaacattagtctttgccagcttgcttagcgttgccgggcagttgtgtcagaaacaggcaacctgctttgtggcgataaacaaacggcgcaaacatatcgtgctgtggctgggactggcgctggcttgtcttggtcttgccatggtgctctggctgctggtcttgcagaacgtaccggtaggcattgcttacccgatgttaagtctgaattttgtctgggtgacgctggctgcagtaaaactgtggcacgaaccggtaagcccgcgtcactggtgtggggtggcgttcattattggcggcattgtgaacctcgggagtacggtgtaatgggcctgatgtggggattattcagcgtcattattgccagtgttgcgcaattaagcctgggttttgcggcgagtcatctgccgccgatgacgcacttatgggattttatcgcggctctgttagcttttggcctggatgcccggatactgttactcgggctgctgggttatctgctttccgttttttgttggtataaaacgcttcataaacttgcgctaagcaaagcctatgccttgctcagtatgagttatgtgctggtatggattgctagtatggtacttcccggctgggaagggacttttagcctgaaagcactactgggagtagcctgtattatgagcgggttgatgctgattttcctgcccacgacaaaacaacgttactgagttttccctgccactttacactgccgttcccactcatcggggctataactgcttgcgctgaggactttcaccgtatgcagcttttcacgattaatacaataaagcgcattctgcaaagggctgagtaaatcccccactttcacggcgaagtcactcttcacttcggcgatcatttttatcgcgccgccagcatcgcagagcataagtacatgtctgttatcttgtttattgcagcagctttttttgaccagccattccattgcattatcctgtttgctaagagttttcacatcaatttacagattaacagataaactctttatcaacggcaatggaatggcagaaatgagaagtgaaacggagggttaattattgctgacgttgcacccactcttttagcgcctgacgactaattttaataccgccgtttttcagctccggcggcagagttagccagcgcaccggttgttgaaaacgggccagcttatctttcacccattcactaagatcaacgctctcgtggtcatactccatcaccgccaccggtcgatgaccaaactccttgtcggcaacggggacgataaacacctgcaaaaccgcaggatgtgcagcaattacgcgctcgacttcttccggctgaataccctctccgccactgaagaatagattgtctaaacgtccgacaatggtcagcttgccattatgcatctcaccgcgatcgcgcgtagcgtaccagccttcgtcattaaccagactaaccagttgcccgttacgccagtaaccttctgccatactggcagcccgcagccacacttcattattaacgattttcacttcccgacccggcagcgggctaccaacgtctgccaggccgtcggcttctttcgcacacaccgtggaggcaaactcggtcagaccatagccgcaaaagcaacgaatcccctgctcgcgcgcctgttccgtcaactcgaccgggatagccgcgccgccaagtaacaccgctttcagggaaacggaactacggttaaccagcaaacgccagagttgtgttggcaccagactagcgtgagtacagcctgccagcatttgctccaatggctgtttatcacgtaccgtcatccgcgcaccagcgtataaccagcgccacataattccctgaccggagacgtgaaacagcggtaaagagagcaaccaatcatcgtgatcgccaaacggaatcaggcttaacacaccttgcgcactggcaagatgggcctgataagtatggacagcggctttcggcaaaccggtagaaccgctggtcaacgtcatactgcacagacgcgtcggctgccacgtagcggcatgtgcgccttcaaccagctgaatgtgcaggctcgttaatgccggaaacgtgttttccccatccggcaccagagcaaattgcagcgtcagattgggcagcaattcttcaagcaacggttgcggcagctgagggttcacgggcaacacccgcgccccgcattgcagtaacgccagccaggcgagcagcgtttgcggcgtattccacgcccgcaacatcacgccgctgccctcaaccaccccctgcaccgcaaatccggaggctaattcatcgacgcgagcacaaagctcgcgccagttgagttgctcgtcattaagacgtaaggcgatggtttctccccgcacttgccgccagtgacgccacggccagtcagagaagatcataacaaccgctccagtgcatcaacttccacgacaggcagcgtgctacccggccagcgacgtacctgctgcgcctgcatcagatccagcgtgtccagccctggaatggtgtccggcgttaaccaggcggcaatccgcgccagttgcgttaagcctaagctgctttcaatggaagaactgatcaccgccgtcagccccagcgcgtgcgccgcctgtacctgctcgcgtactttttccagactgcccgtgagcgtgggtttgataactaccgcgcgcacgccctcttcagccacaaaggcaaaatccggctcgcgcaggctttcatcccaggcaatggcaatgccggtttcacgggcaaacgctcggctatcatcgcgggttttgcacggctcttcgagaaacgcgatgcggtcgcgataatccgggttaacgtatttggcaaactgctgacctttcagcggtgtccaggcgcgatttgcgtcaagacgcaaatgcagatccggaattgcctccagcaacagattcaccaccatgccgtcgcgcaccgcttcgtacaatcccactttgaccttcgccactttctcgcctggcatatctgcaagtttgaggatcagatcgtccggatcgccattacacagcggtgccgcacggtagttggctgcttgcggcaacgtatctgtcagttctgccaatgcacagcttacgccaaaggccacggaaggcatctgcggtagctcgcaatcgcctgccagccagttatttacccaggcaagcagcacactttgcgcctcttcccaggtttcctgactgaagcccggcagtggggagatctccccccacccttcgcgctcgccttcacgcaggcaaacatacagcccgtcgcgggtttttaaccgcctgtcgcgcagaaccacccccgcgtccatggggatctgccagcggtatacctgcgcgctacgcattacggattccgtttgaatttgctgaagtcaggctgacgtttctggttgaaggcgttgcgaccttcctgaccttcttccgtcatgtagaacagcatggtggcgttgcccgccagctcctgcagccccgcctgcccgtcacagtcggcgttcagtgcagctttcaggcagcgcagcgccatcgggctgttttgcagcatttcgcggcaccaacggacggtttctttttccagatccgccagcggtaccacggtgttcacaaggcccatatccagcgcctgttttgcgtcgtactgacggcacaggaaccagatttcacgcgcttttttctgcccgacgatgcgagccatgtaggaagcgccccagccgccgtcgaaggaaccgactttcgggccagtctgaccgaagatggcattatctgccgcgatagtcaggtcgcacatcatgtgcagaacgtgaccgccgccgatggagtagccagccaccatcgcgacaaccggtttcggacaggtacggatctgacgctggaagtccagcacattcaggtgatgtacgccggaatcatctttatagccgccgtaatcaccacgcactttctggtcaccaccggagcagaacgctttatcgcctgcaccagtcagaatgatcacgccgatgttgtcgtcataacgcgcatctgccagcgcctggatcatctcttttaccgtcagaggacggaaggcattgcgcacctgcggacgattaatggtgatttttgcgataccgtcggtggatttttcataacgaatgtcctcgaaaccttcggagcagtcgtgccattcaaccggtgcgtaaagcattgcttcatcaggataaatcatattgtgtcctttagtcagaaacgcaagatctgcgccagacttgcgattacgccagcgggattttcccgatgcgcgttatgtccggcgcgaggaatgacatggcagtcggcagccagttccgccgccagggcgcggaatttgctgtcacgttcaccacataaataataaaacgcaaatgtgcgggcgctaaggttagcacgtaaatcaggctggacggcgagagaagtcgcctccagcatggcggcaagcgttgcgccattattgttgctgcgcagcgccaccagctcccggcgttgatcgtcattgagactggcaaaaacaggctgttgataccagtcggcaaataccgccgttaacggttctgtgagaaaacgctgcacccattggcgatcggaacgctgacgttccgcacgttgttcagcattttgcagccccggatgcccgccttcgacaataaccccacaaagccccgccagcccctggcaagccgccatcatcgccacccgtccaccaaggctgtaccccaccagccagaagtcaaggatgttgtaactaaccaaggttttacgcagtaagtcggtgacatcatcaaatccatcgacgctaatcgccgcgctaccaccgtgacctgggagatcaacatacaaccgactgtagtcggcaaacgcctcgcccacttcttgccattcgtggcaatcgccggaaaaaccgtgcaaaaacaccagccagggtaaacctggttttccgtgttttgcctgcgcgtgcaggatcataaatggcttacctgcgccagaagttgctggagcgtttgcgcaccatcggtgtcgttaaccaccatttcaatcaccgtggtggttggcgtgcgccaggcgtcggcaaatgccgtttcaagttcctgccagttttgcggacgatgatatttcagctcgaacatcgcggcggcgtgctcaaaatggacgttttgcggcatcagatagaaacgctcacgctcgctttgcggcgttggcaacaggctgaaaatttgcccgccgttgttgttcaccacaattaataccagcggcgcagaaacctgacgcaataacgccagcgcgttgagatcgtaaagtgcggagagatcgcccacaatcgccagcgtcggtttgccgcttgcccgctgaacgccggcggcggtgctaagcagcccgtcgataccgctggccccacggttgctgtacaccgggtaacctgccggaagttggctaagcgcatcaatcagacgtaccaccaggctgttaccaacaaacaattgcccctgttcaggcagatagtcgcagatgcgatgcgccagttgcgcttcgccaaacgcatcacggcgggcaataaccgcctgcattgcctgttccgccaggcgcgggatttcaacgcaccagggctggcgtttttctgccggatgcagctccagccagtcggcaatattggcaattaagcgacgtccgcgatggtgtgccggatcaagtcgcccttcaatgtcatcaacaatccagtactcttctggttcacagcttgcctgccattgcaggagccgtttccccgtcaggctgcttcccagttgcaccacaatttgcgcctgctgcagctcgctggtcgctttggcattgcctaaccaaagatcggcacacggcagcggctgcccggtttgactcagcacatcgccaatcagcggccagccaagagtttgcgcccacagggcaacttttttgccctcttccgcactcatgcgcccggcaaccaccacgccgcgcttttgtcgccagaagaaccagtcgcgctgtttttcactttccagacgaggcgcttcacgcagccacggtttgtcttcctgccaccagtcacccagacgctgttgccagctaagcccggtatcgtccatttcgccatacagcggttcagcaaacgggcagttgatatggactccccccgcatgaagcgtaccgagagcgtggtcgatggtagaaaccagccaacgtgcggggatatcctgggtcgggcgcggcaaactaatactgtgcgtggggtgagaggcgaacattcccggctggcgaattgcctgattcgcgccgcagtcaattagctccggcgggcgatcggcggttaagagaatcagtttttctccggttaacccggcttcaatcagtgccggatagagatttgccaccgccgtgccggaggtcacaatcaccgccaccggctgcttgctgactttcgccagccccagcgccagatgccccaacccacgctcatcgaaatgggtgtggtgaatgaatgcggaattctccgccgccgctaacgttaacggtgtagaacggctgcctggggcgatacagatgtgtctgacgccgtgacgcgttaatgcttccagaatgaccgccgcccagcgtcggttaaatgcgcttacactcatgagtttgtccggtatcaatattgcggctaagtataaggagctacaaaaatagattattgatatgaatcggtaatgatgcgactcattattattccatttgtaataaagtacgcagccctgccgctttgttgtcgatttcctgccactcttgctcggggtcggaaccacggacaatgcccgcgccagcatataatcgcacgacattgccgctaatttttgcactgcgcagggaaacgcagaattcgctttgttgtaaactgagatagcccgcagaaccggcgtaccattctcgggtgaacggttcgtgacgggcgataaactgtcgcgccagatcgcgcggtaagccagcaactgctgccgttggctgcaactgatgtaaacagatcacatcatccgctttgttgagactagtccagatacagcggcgaagatgctgcactttacgcagacgcagtacctgcggcggtaaaacatccagcgtctgggtatcggcctgtaatcgttgacagatatcttccaccaccagcatgttctcgcgctggtttttatcatccgccatcagccactctcctaactgctgcgcctgcttatcatcaggattatttgctactgttcccgccagcgcttcagtacgcagcgctttgtcacgccgccgccataaccgttccggactagagccaagaaaagcattttcgccatcaaaggccatgtaaaaatggtagcaattcagattcagtcgacgactggcagccatcatcgccgccgcgttgaccggacttgcgaaatgcaggtcagttgcccgagcgagcaccactttgtcgagctcaccttcggcgatggttttcgttgccagttcgattaattgcgtccagcccgttttgtccggccagtgttgttctcgcgtggtggttaaatgtaacccaggcaagggcttgatactcaccagtgtggcgataaattcttttgcctgaatcgcatcgtgctgaagggagctttcgctgaatagcgtcagccgcagcgtggctttaccgccacagcgtcgccattccaggcggggtaaaagtaaattgccctggctcgggtcaaaagcattcagcccccaaatgcgtaagtcggcgtgttccgggtgctggcgaagaaaacgttgtgcctggtccaagctcgtaaaacgggtaatcgcgcccaggacgacagcttcttcatcaccattacgttgttgccagtagaattgcgggtatgtttgctgactggccagccagctcaaggcatcaaaagcgtctttgagagggaaaggaatatcgataacccgaatgccgggtgtcgccggaatctcttggctcaaatggcgcagtagattttccagcgccgtagtaagactttgcacgcggacctctccctgttaaaagcctcacattatacggggtactacaaaaaaaatgcagtaccccggtgtagggaggttttaacggcgtgccagcaacagtcctagtaccagcccaacggccgcgcccacaccaattccttgccagggtttttcgtggacgtagtcatcagcacgataaactgcctgcttcgcccgatagtaataactgtcactagcctggctaacccgttttttcacatcatccagcgctttttctgcacgcgctttcagctcaacatatttctgatcggcgggatcgccagaggagcggagcacctcttccagtgtttcactaagcagcgtcaggtcgtcatcgatacgtgtatcaccaaactgattagacattctcgttctccatttgcgtaaaacctgtcactaactatagacaagggttgttgattacgcctgaattacctcgcgtgccatcccaatgtgtgggataccatcttcttcatagacctccgtcacagggataaaaccgaaactctggtagaagttttgcagatgcgcctgcgccccgaggtaaacaggcttatcaggccagtgatgcgtacatgtttcgagtgttttactcatcagctgctgccccactttttcgccacgcaacgcttcactgacaatcacccgacctataacgaccggctcaagatcatcatcacttttcagaatcctcgcatacgccaccagttcatcatttttccaaccgagaatatggcgattatcccccgtcaaatcatcaccatcgatatcctgataagggcaattctgctcgacaacaaacaccgcgcaacgcagttgtaataaggcataaagctgggaaacgcttaattcagagtgatgcagatcttgccattcaatcataatgctctccttttagatgtatgccttatactagccggaatattttttgaaacgtgatgaactcatggaattaatttttttaggtactagtgccggtgtgccaacccgcacgcgcaatgtcacggcaatattgcttaacctgcaacatccgacccagagcggactttggttgtttgactgcggtgaaggcacccagcatcagctactgcataccgcctttaaccctggaaaactggacaagatttttatcagtcaccttcatggcgatcatctttttggtttacccggcttgctgtgcagtcgttctatgagtggcattatccaacccttaacgatttatggtccgcaaggtatccgtgaatttgtggaaaccgcgctgcggattagcggcagttggaccgattatccgctggaaattgtcgaaattggcgctggcgaaattctcgatgatggcctgcgcaaagtaaccgcttatccgctggaacacccactggaatgttatggctatcgtattgaagaacatgataaaccgggtgcattaaatgcccaggcattaaaagctgctggcgtgccgcctggcccactgtttcaggaattaaaagcgggcaaaacaatcacgctggaagatggaaggcagattaacggcgcagattacttagctgctccagtgccaggtaaagcgctcgctattttcggcgataccggcccctgcgatgccgcacttgacctggctaaaggtgtcgatgtcatggtgcacgaagcgacgctggatataaccatggaagccaaagccaatagtcgcggccatagctctacacgccaggctgcgacactagcccgtgaggctggagtcggcaagctaatcattacccacgtcagcagccgctatgatgacaaaggttgtcagcacctgttacgtgaatgcaggagtattttcccggcgactgaactggcgaatgatttcaccgtgtttaacgtttaactctgcttattattaaaaacagggcgaaacttgccctgttatcgcaacccgcgctacatatatccacccacacaggcatattgagcgatttttgatatttattcatctccttacgcactatattcagagcaataagttgcctcttttcatcttgattcagcacaacctttgcaactaaaaggagcccatgatggttacagttgtcagcaattattgtcaattatctcaaacgcaactcagtcagacatttgcagaaaaatttactgtgaccgaggaattactgcagtctttaaaaaaaacagcgttatccggagatgaagaaagcattgagttactgcataatattgcgttaggttatgataaatttgggaaagaagctgaagatattctttaccatattgttagaaccccaacaaatgagaccctaagcattatccgacttatcaaaaatgcttgtttaaaattatataatctggcacatatcgcaaccaactcccccctcaaaagtcatgatagtgatgatctcctgttcaaaaaactattctcccctagcaaattaatgacaattatcggtgatgaaattcctcttatatctgaaaaacagagccttagtaaggtgcttttaaatgatgagaataatgaactgagtgatggtacaaacttctgggataaaaatcgtcaattaaccacagatgaaatagcttgctatcttcagaagatcgccgctaatgcaaaaaatactcaagtcaattatcctactggtctctacgtcccctactccaccagaactcacctggaagacgctctcaatgaaaatattaagagcgatccaagttggccgaatgaagtccagttattccccataaatactggcggacactggatattagttagcctacagaaaatagtaaataaaaaaaataataaactacaaataaaatgcgtcatattcaacagtttgcgtgcactaggctatgataaagaaaatagtcttaagcgtgtcattaatagttttaattctgaactcatgggagaaatgagcaataataatataaaagttcatttaaatgaaccagagataatatttttacatgccgatcttcagcaatacttaagccaaagttgcggtgcatttgtgtgcatggcagcccaggaagtgattgaacaaagggaaagcaattctgacagcgccccctatacgttattaaaaaaccatgctgacagatttaaaaaatatagtgcagaagagcagtacgaaattgattttcaacatcgactggcaaacagaaattgttatttagataaatatggcgatgcaaatatcaatcattattatagaaacttagaaataaaacacagtcaacccaaaaatagagcatccggcaaaagagtgagttaacatcattgttaattaattcgaccagtcagcaaatatgctgactggtcgaacatagtttgctaaacagtcatcactgactgatgtcagtcacaccatccgccagttcaatcaggcgaataaattccgccctgtaaccctgtggatcttccccttttgcctgctgagcccactgtttgatctgctgccaggaggtattgttcaggtattcagaaccgcgtaacttttgcccatatgcagctactgctgcgcgaaaacgcatatcttcagagggcgcgtttattgttggccccagcgggaattcaactaactgactttcttttccctgcgggtatttccagcgaatttttaaccaggccagttctttcgttttgtcgcttttcgctaatttgttatccggggcatagcgtaacttatcaatacttgctttttgcccgttcagcgttaattcgaataacaacgttatatgtttgcctgcgcctatatcccctgcatcaacgttgtcgttattaaaatgttccacccgaagttggcgcttttcataaccaatctgacggtattccgttacccacgcggggttaaactcaatttgcgctttgacatcttttgctacggtaatcaacatctgccgcatttcactattcaatactttctgcgcttcagagagggtatcaatgtagctgtagttgccgttaccaacatcggcaattcgcaccatcattgcctcgttgtaattgctattccccacgccaaacgtgctcagagtaacaccagactcccgctgttttttgaccatactttcaatgctttttggatcgtcaatgccaacgttaaagtcaccgtcagtggctaataaaatgcgattgatgccgcccttaataaaccccttcgtcgcctgctgataagccagttccagcccggcaccgccattggtactgccttcggcatccaggctatcaattgcggcattaatttccgccttatgactcccggagatagaaggcaatgcaatacgggagtcgccagcgtaggtcacgatggcaatgttatcctgctcacgaagttctttgaccaataatttcaagctagactggataagtggcaaacgttcatcagaaatcatactaccagaagtgtcgataagaaagaccagattagaagctggtaactcttcacttttgcgatctttcgccaggatatcaactttcagcaatgttcgctgttcattccatggtgcaggtgccaattcgtagcgcatagcgaaaggtattggcttagaggccggaatagattgtttgtctttgatatcccaatcagacgggaaataattgactatctcctccacccgcacagcgtctggcggaggtaacagcccttgattgaggaaacgccttacattcgcataactgccagtgtcaacgtcaagactaaacgtcgccaacggattttgcgctacctgcttaaccggattatcatcgaactgctggtagcgagcggttcctggatttgcgatatgtgtagcttttgctttagccgctcttgcaaatgttggcgcttcctgcaatcgcccctgtaaagcctgtttgtcactatattgttgcacttcttgctgggccaaggctttcgcggcggcggcgctttgctcagcctcttttattgcagcttgctgcgcggcaagcacttgctgctctgtgggagtactgggttgttgttgctgactttccttattctcaggttgcggcccacatccactcaaaatcaaactactcataagcaacatgattatatttttatttcgcatataaaatccttttaaataaactcaggcaccagacataaaatatactctttgtataatcctgctaatcttaataaaatacaatatcgaaacccatagcaaataatgattcaacaacgcaacccattaataatttgcatatgaaaaaaataatctttgcttttattatattatttgtgtttttactccctatgattattttttaccaaccctgggtcaatgcattaccgagtacgccccgacacgcaagtcctgagcaattagaaaaaacagttcgttatcttacacaaactgtgcatccacgtagtgccgacaatattgataatctgaataggtccgcagaatatataaaagaggtctttgtcagtagcggtgccagagttaccagccaggacgtccccattacgggtggcccctacaaaaacattgttgctgattatggtcctgccgatggaccgctgattattattggtgcgcattatgactctgccagcagttatgaaaacgatcaattgacctatacgccgggcgcggatgataacgccagcggtgtggcaggattactcgaactggcacgtttgttacatcagcaagtaccgaaaacaggcgtgcagctggtcgcctatgcgagcgaagaaccgcccttctttcgtagcgatgaaatggggagcgcggtgcatgcagctagccttgagcgtccagtgaaattaatgatagcactggagatgattggctattacgactctgcgcctggaagccagaattacccttacccggcaatgtcctggctttatcccgatcggggagactttattgccgtggtcggcagaatacaggatatcaacgccgttcgtcaggtaaaagcggcattgttgagttctcaggatttatctgtttattctatgaataccccagggtttattcccggtattgatttctctgaccacctgaattattggcaacacgatattcccgccataatgattactgacaccgctttttatcgtaataaacaataccacttgcccggtgataccgcagacagattgaattatcagaaaatggctcaggtagtggatggtgttataactttgttatacaacagtaaataataaaaatttctcgaggcgggtccagaaaaagcgacatgcacattttattttccctcatctgttttaagatgcgaaacatgaaattcaacggaggaaaaataaatgggaatgattggctattttgcagaaattgacagtgaaaagattaaccaactgcttgagtctactgaaaaacctttgatggataatatacatgacacgcttagtggattacgccgactggatattgataaacgctgggattttttacactttgggctgacaggcacctctgcttttgatcccgcgaagaatgatccgctgagtcgtgccgtgcttggtgaacacagcctcgaagatggcatagatggcttccttggattgacctggaatcaggagttagccgcgacaatcgaccgactggaaagtctggatcgaaatgaactgcgtaaacagttttccattaagcgactcaatgaaatggagatttatccgggagtgacctttagtgaagagttagaggggcaactctttgccagcatcatgcttgatatggaaaagctgattagcgcgtatcgacgtatgctgcgacaagggaatcatgcgctgacggttattgttgggtgatatagcttgatgcctgggggagaaagacccattagttaagatttacgccaggatcatcttgaaaaaatctttaaccatggtccggtttttatccccttgtataaatattactaaatgcttgcttagtcgcattgttaaatgcaataccgtatattcggtatgtaacagcgatatcctctgtgctggcaacgatctgtcatgcttgatgaaaacggaattgaacctgtcattaccaggtagataaaaagcctgttcaattttgggattattttttataactcgtgtctgttatggcgacacgggaaaacatcaatattgtccttcacaaattgcagtaatatagaatcaacctctcttgcaagttggtcacaatgtattataagcattttgaatatgtcatcctctgtaatctcgtgaaaattttcggccttgtcttttagctcatcatatcggattcttgcagtaaccattttttgggcgagttctaataaccccaaagcttgcaattgctggtgagtatgatcactttcaaaaaatatcccacactccattccttcccaaccaacatattcatgccattcataaaccagcataaatgtttgtaaaactggcggtaataattggatatctgcaaaaccaaaccaaaacttacgcttgagatcccactcatattcaatcgccaatgctatattgtttaaggcatctccggcatccttatttttacgcaaaatcaattccgtcagtgtatagcgttgttcatcaatacgccgaagagcttctgcaatatcatagtttgtagccaacaaaacattctctgcttcctgatgagtgacgtctgcttttgccgtcaatatattgatttggtcaatatgaaacaacttgatggcttcatcaacatcaccgccagtcctctctaacaaacgtctggcaacctggataccgacaggtacgttcttccgaagtttacgaatttcacttaaccattccatgtcaaacccctttaaatatttatgatattaaatataacaacgtctggataacgacccggcctgactgaatatctcacgttttcctgcttaacattcatgttatgatgctcttgaaactaataatacgtatggaattgtcactatttatctgctaatgaatagtaacaatgtcattcgtttgatgaatatattatttcagggaataattatgacacctttagaacgcattacccaacttgttaatatcaatggtgatgttaataatcctgatactcctcgtccattgttatctcttgaggatttttttattgacaataatatccatggtagtatatgttgcaatgtgattccagaacaatctccgcaagctatctatcaccattttctgaaaatacgtgagcgtaacaatgttagtgatgttttggtagaaattacgatgttcgatgacccagactggccctttagtgaaagtattttagttatcaccactgctagtccagaagaagttcagagctggtttgtagaagaaattgcccctgatgagtgctgggaaggatggagtgaagatacggagcatggatgggttgaagtccctgtgggtatgcatccggttacttgttggtgggattaaaacatttatataaacagataagcggatgtttacataaatttttatgtgaaggaacatgatgaaacttattcctcgcagtagtgatattagtcctggcattgatggaatttgcccggggccttttcctccgaacggatttaccgtacttacagatgcagcatatggtaacggagactgtttcggtttgtactggcctattggtcaggagcataaactacctatagtgtgcgaaacgtaccatgacgaatggcgaatcgtacctgccttttccagcattaagaagttcgaagaatggctggaagtgaatgatgatgatccccatgaaaatggcatcagcatcgaagatcaagactttgcagcaaatctcttccgtgttgctcggaaatgtcttagtacgggaaggcttgatgacgcactgccactgttacagcgagcaacagaacaattgcctgaagtcagcgaatattggttagcactggcaatccagtatcgccgatgtaaaaaaacagaagctgcagcacaggctgcgcttaatgcttatcttggcaattgggcatttggtgttcctgacaataaagtcattcatttgctgagtcaggccgcagatgtcccgaatttccaggatgatcctgtgattcagtgcattaaagaacaaggattagatcttagctttggaggaacaaaggaaaataataattaccccttgatgcagatgtgtgttgatacttattttgcgcagagaaaaccgcttcaggcattaaccctgttacataattatgcctggataatgtccagtgaaacgactgcatttcaggaacgctatgattttaatatcgatgaatggcgggcaaaattcaggcagttatgtttagagtattttggcgatagtcgtacacagttcacttaacgctctgcgtctatctactatcccttctttttcagaaaaaccgccgagcatgtcggcggctttctgacttacaaagtaacagattacatcagcggcattgccaaacgcacaatgctaatcagcggttgtggccatacacccagcaccagtaccaacagtgcagagatcagcacaacgataccgcccgcgctgtactgccagttacttggtgcatcgcgacccggttgttccggggcgtgaagatacaggctcaccgccacgcgcaggtagtagtagaggccgattgcgctaccgacaaccacggcacccaccagccaccacaagtgtgcctggacaccgaccgccagcacgtagaacttaccgataaagcccagcgtcatcgggataccggccagagacagcatcatcaccgtcatcactgccgcgaggatcggacgatgccagaacagaccgcggtaagagaacagggaatcagcatccgggccacgatacgggctggacatcaggctgaccacgccgaacgcgccgaggctgctgaacagataaccggccaggtaaacccctaccgcttccatgctcatctcgccggtttgcagcgcaatcagcgctaccagcagatagccgaggtgagagatagaactgtaaccgagcagacgtttgatattggtctggctcagcgccatcaggttaccgaagatgatggaggcaaaggcgataatcgccagcaccacgcgaatcgcttcgctgtcacccaccggtgcgtagaggaacagacgcatcaccacaccgaagatagcgattttgctcgccgtcgccaggaaagtggaaaccggcgcaggcgcgccctggtatacgtctggcgtccacaggtggaacggcaccagagagagtttgaagccgaggccaacaatcatcaggccgaaacctgccagcaacagcggctcgttgagcataccgtcgccaaggtttttacccaacgcgacaaagctcaggtcgccagactgcgcatacaccagcgccataccaaacagcaggaaagaagacgctgcggcagaaaggatggtgtatttgatactggcttccagactacgtttctggcggaaagcgtaaccgaccaggccaaacagcggcaaagagatcagttcgataccgaggaacagagacgccagatggttggcattcgccagcaggatcccgcccagcgcggcaattaacaccaacaggtagaactcatccttgttgtcgttatagccttcaagccacgggtaggcgaaagtacaggtggcgaggctcgccaacaataccagcccggtgtaaagcatggcgaaaccatcaacgcgcatcagcggcgtaacgtccatagcgcccgcctggccaacaaaccagagcgaaaccagcgccgcgttaagcccaataaccgagagcgtagcgttgaggaaatgattgcgtcgccacgcaatggagagcatcacaaccaccaccgtcaagccgacgatcagcaacggtagcagtgcgatcaggttttgtggagttattgtcatggcgatttacggccttgtagtagtaacggaattaacaaaccactgctggatattgccaatcgcggagtggctggtatccagaatcggctgcggatagaagcccagcagtaccagcagcaccaccagcaacaggatcataaacagctcacgcaggctcatccctggcagttcctggctggcaatctggcttttcgctttaccgaagtaagcgcgatgtaacatcgccaggctataaacagatgcaaagaccagcccaaaggtagagataacggtaatcaccggtacaacctggaagctgccgaacagaatcataaattcgccgacgaagttaccggtgccaggcatcccaagcgttgccaccgcaaagaacaggctcagtgctggcagccatttcatcttgctccacagaccgcccatcatgcgcatgtcgcgggtatggatacgttcataaagctgaccacaaagaataaacagacccgccgcgctcaaaccgtgcgcaatcatctggattaccgcgccctggtaggccaactggctgccggtgtagatagcaatcagcacgaagcccatgtgggaaacgctggtgtaggcgatcagacgtttgatatcggtctgggcgaaggccatccacgcaccgtagaagatgccgataacacccagccacatagcaattggcgcgaactctgcgctcgcgttcgggaacagcggcagggagaaacgcagcaaaccgtaagcggcagttttcagcaagatccccgcgaggtcaacggaaccggcggtcggagcctgggagtgcgcatccggcagccagccatgcagcggaaccaccggcattttgactgcgaaggcgatgaagaagcccagcattaacaggtattccacaccactggacattggcgtattcagcagctcttcatagttgaaggtccagacgccggtcgcattgtagtgaacaaaaaccagcgccaggatggcaatcaacatcaccaggccactcgcctgggtgtaaatgaagaacttggttgccgccgtgatacgcgttttaccgtcagaggctttatgcccccacagtgcgatcaggaagtacatcggcaccagcatcatttcccagaagaagaagaacaggaacatgtcgatggcaaggaacacgccgataacgccgcccaggatccacatcaggttgaggtggaagaagccctgatatttttcgatctctttccagctacatagtaccgccagcacaccgagcagaccggtcagcacgaccatcagcaggctcagcccgtcaatggcgagatgaatagagataccaaaacgcgggatccacggcatgtcgaattcagactgccactgcggaattccggcggattgcgtcagactataaccgccctgcaaccacagttgcaggctcagcgccagcgtcaatcccatggtgatcagcgcgatccagcgtggcaccttgacgccaaagcgttcggtctgccagcacaggaagccgccaataaagggaattaatattagccagggtagtaacatggcgatctttattccttgtaaaagtcccgtcaggaccggattttcaacgaattctcacgacagaaaattctcttcggactgggggtagtgtcggatgcaccgcgaaggcggcttatccgacctacgttcttatatgcccaggggcaatcccacaatccttaactcaacgcagtaccatcaacagtgccagcaccacgaccgcaccgatgctcatggatgccacataccagcgcagatagccgttctcacttaacagcagacctttacctgcaaagcgggaaaggacagccgggatgttcatcatactgttcagcggatcgcgtttcagcaaccaggcaatacccaggaacggcttgacgaacactttgtcatacagccagtcaaatccccaggcgttgtaccaccaggtgcccagcagacggcccggcgcactgttggcgatggaggtcaccagagtacgtttacccagccacagccaggctgccagcagaatgccgaccaccgcgaccacgccagaggtaatttccagggtcaacatgctgccgtgcgccagttccgtcgtttgcggaagcacgccctgcagcggcggtacaatcagtgcgccaacgaaggtggaaaggatcagcagcacaatcagcggcaggctgtgagttacccctttcacggcgtgagcgtgaatttgttcttttccgtggaagacgatgaaaatcatacggaaggtgtagaggctggtcataaacgcaccgaccagacctgccaccatcagattgatatgaccattcgccatcgcacccgcgaggatctcatccttactgaagaagcccgcagtgaccagcggtagtgcgctcagtgctgcgccgcccaccaggaagcagagataaaccagcggaatagatttacgcagaccgcccatcttgaagatgttctgttcgtgatggcaggccagaatgacggaaccggatgccaggaacagcagcgctttaaagaacgcgtgggtcatcaagtggaaaatcgccgcatcccatgcctgcacgccaagcgcgaggaacatgtagccaatctggctcatggtagagtaagcgagaacacgtttgatgtcggtctgtaccagcgcggcaaaaccggccagcagcagcgtaaccgccccgacaatacccaccagatgcagaacttccggcgtcatcaggaacaggccgtgggtacgggcgatcaggtagacacccgcggttaccatggttgcggcgtggatcagcgcggagacaggcgtcgggcccgccatcgcgtcggcaagccatgtctgcaacggcaactgcgcagatttaccgaccgcaccgcccagcagcatcagcgtcgcccacatcagcatgttattgccgtcagcaaagtgcgctggtgccagttccaccatttcgcggaagttcagggtgcccagttcgttgtaaagaatgaacagtgcgaaagcgaggaacacgtcacccacacgggtcacgacgaacgctttcattgccgctgcgccattcttcggatcggtgtaatagaacccgatcagcagataggagcacaggcccacgccttcccagccgaggtacatcagcagcaggttgtcggcaagcaccagaaccaccatgctggcgatgaacaggttggtgtaagcgaagaagcgagagtagccctcttcaccgcgcatataccaggaggcgtacatgtgaataaggaaacccacaccagtgaccacgctgagcatggtcaggctcaggccgtccagcaccaggttaaaaccgatgttaaagtcgcctacgctcatccacgtccacagcggctggctgtatgtctgctcgccgttagcgaagaaatcaacgccgataaaggcggttaccagcgccgccaggcccacagagcctacgccgacgatcgcgctgacgttttcagaccagcgcccacgggagaatgccagcaggacgaagccaatcaatggcaaaataatggttaaggcaagcatgttcatccgcgcatctcacttacactatcgatgttcaggttctggcgacgacggtgaagttgcagcagcagcgcaaggccgatactcgcttctgccgccgcgaggctgatggcgagaatgtacatcacctgaccgtcggtctggccccagtagcttccggcgaccacgaaggccagcgcggaggcgttaatcatgatttccagaccaatcaacataaacagcagattgcgacggataaccagaccggttaagccaagaacgaataagattgccgcgaggatcagtccatgttgtaaggggatcatgcgtgctcctccgtttttcttttcgcgctgtcgtctttacgattgctcagcacttcacccgcacgctcttcacgaccgacgtggaaggccacaaccagacctgcgagcagtagcatagaagccagttccaccgccagtacgtaaggcccgaacagcgtaatacccactgctttagcactgattggcgtaccgtcgataccctgatcgttaacaccgaggatggcgtaaacaatcaccaccagcatgatggcgctcaaaattgccggaccaatccacacctgcggtttcagccactggcgttcctgttcgatttcactaccgcccaggttgagcatcatcaccacgaacacgaacagcaccataatggcacccgcgtagacgataatttccagcgcaccggcgaagtaagcgcccagactgaagaacaccccggaaatcgccagcaggctaataatcaggtacagcagtgcgtgtaccggattggtatgggtgatcactcgcaaggtcgcaagtatggctatcaggccacagatataaaaagcgaactccattgcccctctccttacggtaacaggctcttgacgtcgataggcttggcttcgttctctgcttcgcccttatctttgccgtcgattgccatacctgccatccggtagaagttatattccgggtatttgcccggaccggagatcagcagatcctctttctcgtaaaccagatcctggcgcttgtattcccccatttcgaaatccggggttaactgaatcgccgtggtcggacaggcttcttcgcacagaccacagaaaatgcagcgactgaagttgatgcggaaaaattccgggtaccagcgaccgtctttggtttctgctttttgcaggctgatacagccgaccgggcaggctaccgcgcagaggttacaggctacgcaacgctcttcgccgtccgggtcgcgggtcagaacgatacgaccacgataacggggcggcagatagaccggctcttccgggtacattcgcgtttcgcgtttggcgaacgcgtgcaggccgatcatccagatactacgaacctgggtgccgaaacctactaacaattcttttaaggtcatggtcttattgccccttattgcgcctgccagagaatgacagccgccgttaccagcaagttgatcagcgtcagcggcaggcagattttccagccgaaggacattacctggtcataacgcggacgcggtaagctcgcacgaatcaaaatgaacatcatcataaagaacgcggttttcagcgcgaaccagatgaatggcggtaacaacgggccttgccagccaccgaagaacagcgtcaccatcaatgcagagatggtcacaatcccgatgtactcacccacgaagaacagaccgaacttcataccggaatattcaatgtggtaaccatccgccagttcctgctcggcttccggctggtcaaacgggtgacggtgacataccgccacgcccgcgatggcaaaggtaataaaaccaaagaattgcgggataacgttccacacatgcgcctggctgttgacgatgtcggtcatgttgaaactaccggcctgcgccaccacgcccatcaaggaaagcccgaggaacacttcgtagctcagggtctgcgcagaagcacgcatcgcacccagcaagctgtatttgttgttactactccagcccgcaaacagcaccgcgtaaaccgccagacctgccatcatcaggaagaacaaaatcccgatgttcaggtcggcaaccacccaacccggactgactggcacaatcgcaaaggccagcagcaggctggtaaaggcaatcatcggtgccagggtaaagatgacgcgatcgctgaatttcgggatccagtcttctttaaagaacattttgatcatgtccgcaaccagctggaggctaccgccccagccaacacggttaggtccgtaacggttctggaacagacccagcaggcgacgttcgccaaagctcatgaatgccccgcaggtgacaaccaccagcaggatcaccaccgctttgaggatggtcagcaggatctcaatcagttccggacttatccaactcattgttgtgcctccttgagatcctcaagatgcgcgccagccagcaccggagcaatgccggacatacccatcggcaagcccacctgccctgccgtcagtccttcggcgatttcaaccggcagcgtgaccgtgttgccatcgtaactaaaggagacgcgtgtacctgcgttcacacccaacttcgcggcatccgctgggttgagtttgatgtacggctgcggcatacggctctggaagaccggagcacgctgactcaattcatcgctgccaaacaggtggtaatacggcgcgatacgccatttcccgtcctgcggctggaagcgtgccggtacgctggtgaagtaatccagaccattttcgctggtttcaaacagacgcacgcccggatcgccaaagcgcagtttgccgcccacttcgtcctggaatttgttccacgcctgcggggagttccagcccggcgcccaggcaaacggcacttggctacggtgcgcagtcggctggttgttaccttccatgctgaaggtgaacatggtgtcaatatcctgcggctgacgcggctcatgaacgctgatattggcgcgcatggcggtacgaccgctgtaacggtgcggttcacgggccagtttctgcccacgaatacggaatgtcgcatccggcgcagcatctttgatacctgccagttccgggattttcgccacaacagcgtcaatcacatggtcgagctgcgtccagtccacttcacggctcagcagggtgctgtgcaggctgtgtaaccagcgccagctttccagcatgacagttttgctgtcgtaataagcaggatcgtaaacctggaagaaacgttgggcgcggccttcgttgttgatcaccgtaccgtcgctttcagcaaagctggcagcagaaagtaccagatgggcgttttccataatcgctgtgcgttgatgatcaaccaccatcaccagcggtgctttagccagcgcagcattcacgcggatagcagaagcgtgacgatgcagatcgttttccaacaccaccaccgcgtcggcgcgtccggtttccagttcggttaacgcttcttcaaggctaccgccacccataatgcccagccccatgctgttgacggaacgggcaatcatggtgataccgacgtcagcgccgcgacctttcagggctttcgcgacgttagccgccgcctgaatcacctctaagctaccggcgttcgtcccggagataatcaacggtttcttcgcacctgccagtgcctgcacgatgacgtcgattttgctttgcagctcaggttcgataccgtcaaccgctggtgcagagttatccagcgcatgggcgatggcaaaacctaaacgcgcctgatcttcaaccggtgcgcggtaagtccacgccgcgatatcatccagacgggtgtcatcaacgttggtaacaaacagcggatgcttcgcacgttgaccgatgttgaggattgccgcaatctgccagtcagccactttctgtgctgccgccatttcgcgcgctttacctttcacagcctgacgcactgccagcgcgacgcgcgcgccggtctgggtaacgtcttcgcccagcaccagtaccgcatcgtaagattcgatttcgcgcagagccggagtataaatgccgccttcacgcagcactttcagcgccagttgcagacgttcctgctcaccgtgagcgataccggtgtagaagttttcttcgcccaccagttcacgcagcgcaaagttgctttccacgctggcacgcggagaaccaataccgatcactttcttgctctgacgcagaatatctgccgcgccctgcattgcctgttcggcgttgagggtaatgaaatcatcgccacgacgctgtactggctgacgcggacgatccttcaggttgacgtaaccgtaaccgaaacgaccacggtcgcagaggaagtagtggtttaccgtaccgttgtaacggttttcgatacgacgcagttcgccgtaacgttcaccggggctgatgttacagccgatggaacattgctggcagatgctcggcgcaaactgcatatcccatttacggttgtaacgctcggagtgcgttttgtcggtaaatacgccggtcgggcaaatttcgaccaggttaccggaaaattcgctttccagcgtgccgtcttccgggcgaccgaagtagacgttgtcgtgcgcaccgtaaacgcccagatctgtaccgtcagcgtaatctttgtagtaacgcacacagcggtagcaggcgatgcagcggttcatttcgtgagagatgaatggccccaaatcctgattacggtgggtacgtttggtgaaacggtagcgacggaagctgtgtccggtcatcacaatcatatcctgaagatggcagttaccgccctcttcacataccggacagtcgtgcgggtggttggtcatcaaccactcgaccacgctttcacggaactgtttcgcttcttcgtcgtcaatggaaataaaggtgccatcggaagccggtgtcatacaagacatcaccaggcgaccacgcgtgtcttccgcgttttggtattgcttcaccgcacactggcggcaagcaccgacacttcccagcgccggatgccagcaaaagtaaggaatatcaaggcccagagacagacaagcttccagcaggttgtccgctccgttgacctcgtattctttgccgtctacatgaattgtagccattagcatgcttccagttttctcagtcagagactgagcgttaatcgaaattcggttaccagcgctctttcagcaggttcggctgaatcccattaatcaaatgggtattgctgaacggctgtttgattcccgcctcaaattcttcgcggaaatatttgatggcgctctgtaacggctccactgcaccaggtgcgtgggcacagaaagttttacccgggcctaagaatcgacacagttgctcaagtgtttcgatatcgcccggctgaccttcaccacgctccagcgcacgcagaattttcacgctccacggcagaccgtcgcggcacggcgtacaccagccgcaggactcacgggcgaaaaactcttccaggttacgcaccaggctcaccatgttgatctcatggtcaaccgccatcgccagcgccgtacccagacggctgcccgctttaccgatactttcgaattccatcggcagatcaaggtgcgcttcggtcaggaagtcagtccccgcgccgcctggctgccaggctttaaatttcagaccatcacgcataccaccggcgtaatcttcgaggatctcgcgtgcggtggtgccgaacggcagttcccacagtcccggatttttcacccgaccggagaagcccatcagcttggtgccagcatctttacttttgctgatgttctgataccactccacgccgttagcgaggatcgccggaacgttacacagggtttcgacgttgttgacacaggtcggtttaccccatgcgccggaggttgccgggaagggtggcttgctgcgtgggttagcacgacgtccttccagggagttgattaacgctgtttcttccccgcagatgtagcgccctgccccggtatggacgaacagttcgaaatcgaaacctgttcccataatgtttttgccaagcagacccgcttcggtggcttcggcaatggcacggcgcagattaactgccgcttcgatatattcgccacgcaggaagatgtagccacggtaagctttcagcgcaaacgcggagatgagcataccttccaccagcaggtgcggcagttgctccatcaacaggcggtctttataggtgcccggctccatttcatcggcattacacagcaggtaacggatgttcatggattcgtctttcggcatcaggctccatttcaggccagtgctgaagcccgcgccgccgcgccctttcagaccagcgtcttttacctgattaacgatttcgtccggagacagcccggtcagcgccttacgcgcgccttcgtaaccgtttttgctgcggtattcgtccagccacactggctgtttgtcatcgcgcagacgccaggtcagcggatgcgtttcgggagtacggataatgtttttcatttataccgctccagcagttcagggatcgcttccggggtcagatgcgcgtgagtgtcctcatcgatcatcatgtttggccctttatcacagttccccaggcagcaagttggcagcagcgtaaagcggccatcaaatgtcgtttgccctggtttgatgttcagctttttctcgagcgccgcctgaataccctgataaccgttgatatgacagaccacgctgtcacaataacggatcacatggcgaccaaccggctggcggaagatctgactgtagaacgttgccacaccttcgacgtcgcttgccggaatacccagcacatcggcgatcgtgtggatcgcaccatccggcacccagccacgctgcttctgaacgattttcagcgcttcaatggacgccgcacgcgggtcttcgtagtggtgcatctcgtgctcgatcgcttcacgctctgccgcactcagctcaaaagcctcggtttgtggttgttgattctcgtgcataattagcggtccacatcactcataacaaaatcgatactgcccagataaacaatcaggtcagacaccaggctgccgcggatcgccgccggaatttgctgcaaatgcgcaaagctcggggtacgaacacgggtgcggtaactcatggtgctgccgtcgctggtcaggtagtaactgttgatccctttggtcgcctcaatcatctggaaagattcattggcaggcatcaccggaccccagctcacttgcaggaagtgggtgatcagggtttcgatatgttgcagcgtgcgctctttcggcggcggcgtggtcagcgggtgatccgctttgaacgggccttccggcatgttgttgaggcactgctcaagaatgcgcagactctggcgcagctcttccactttaagcattacgcgggtgtagcagtcagaaacgccaccacccaccgggatttcaaagtcgaagttttcatagccagaataaggacgcgccttacgcacgtcgaagtcgatcccggtagcacgcaggcccgcgccagtggtgccccactccagcgcctctttcgcgccataggcggcaacgccctgggaacgacctttcagaatggtgttttgcagcgccgctttctcgtaagacgccagacgtttcggcatccagtcgaggaactcacgcagcaggcgatcccagccgcgcggcaggtcgtgcgctacgccgccaatacggaaccacgccgggtgcatacggaaaccagtgattgcttccaccagatcgtaaattttctgacgatcggtaaaggcgaagaacactggcgtcattgcgccgacgtcctgaataaaggtgctgatatacagcaggtgactgttgatgcggaacagttcggagagcataacgcgaatgacgttaacgcgatccggcacggtgatcccggccagtttctctaccgccagcacgtaaggcatttcgttaacgcagccgccgaggtattcgatacggtcagtatacggaatgtagctgtgccaggactggcgttcgcccattttctccgcaccacggtggtggtaaccgatgtctggtacgcagtcgacaatctcttcgccatcgagttgcaaaacgatacggaaagccccgtgcgcgctcgggtggttcggaccgaggttgaggaacatgaagtcctcgttttcggtgccgcgcttcatcccccactcttccggtttgaaggtcagggcttccatctccagatcctgtttggctttggtcagctcaaacgggctgaattcggtagcgcgcgccggataatctttacgcagcgggtgacctttccaggtttgcggcatcatgatgcgtcgcaggttcgggtgaccgtcgaaagtaatgccaaacagatcccaggtttcacgctcataccagttagcgttcgggaacagtttggtgaaggtcggtacgtgcaggtcgttttctgccagcgccaccttcagcatgatgtcgcggttacgatcgatagaaatcagatggtagaaaacggaaaaatccgcggcaggtaacccttcgcggtgtgtgcgcagacgttcgtccatgccgtgtaagtcaaacagcatgacgtaaggtttcggcagtttctttaagaaatcgccaacttccagtaattgttcacgcttgatccacacaacgggaaccccggtgcgagtcgcctgaacagtaaaggcatccggcccaaaacggttgcgcagttcgccaatcaccggatcatcaagatgatcgcgggtctgccaggcgggttcttgcgcggttaagtcggtcatattgttcaccattgcaaatggtccgtggtgactgtcggcgcagtaagcttcgcgaaatagatttaggaataagcgaagaaaaatccctttgccgacaggcgcaaattaaatctcgtcaggtgtacgcaggttagttacggcaatgcgttcaccgcgcttgcgttcgcgctcactttgcatattggcgcgataaacgccctgatcgccaaccacccaggagagcggacgacgttctttgccgatagattcctgcaacagcatcagtgcctgcatgtacgcttcaggacgcggcgggcagcccgggatatacacatcaaccgggatgaatttatcgacgccctgcacaacggaataaatatcgtacataccaccagagttggcacaggcacccatactgataacccattttggttccagcatctggtcatacagacgctgaataaccggtgccattttggtaaagcaggttcctgcaaccaccatcaggtcagcctgacgcgggctagcacgcaatacttctgcgccaaaacgcgccacgtcatgcaccgcggtaaagctagtcaccatctcaacgtaacagcaggaaagaccgaagttatacggccaaatactgtttttacgaccccagttaaccatgtcattgagcttgcccataaacacgtttttgttaacttcttgctccagagggtcggttacgatctcctgcttttgcagggggtaacggtcgttctcaccgttgggatctatgcgggtgagcgtataatccatcttaatgcctcgcggttagcgttgacgattagcgatactgttcgtttccgggttcatacgctcgcggcgactacgcgcgggcgtccagtccagcgcgccaatacgcaccagataaaccagacctgccagtaacacaaaaataaaaattgcagcttccacaaagcctacccagccgctttcgcggatagaggtactccatgcgaacagatacagcgcttcaacgtcgaagataacgaagaacatggccaccagataaaacttggcggacaggcgtaagcgggcggagccgacgctgtcgataccggattcaaacggcacgtttttgctcctcgcgcgtgcgcgaccgcctaaaaaccaaccgcctaccagcatcaggcaacacaggccaatggcaacgataagaaagatagcgaatgcccagtgatgagcgatgacttcagtggatgtactcatactcattgcttactcatcaaaagtagcgccagattcactgctcttcacggcagatggacgccacatcgattcatggggaggaataaaaaaaaccttacaatcactgtagaaattcttttatacagctaattgatgtggttttttactcctttctataaccttttgtcaactttaacaaaagtttcttcacattagtttacataatatcaacaccattagcatttaatgccctttcaccccagatccttgacgactccaggataattagatgttgttgaatcgtgtccgttgtgaagcaatggaaaaaatacgggtctattttgacaggaatttgtgtcgattcctccccccaaaagagagtattttcttgatctgtgacacgcttttgtcattccataacaaaaacgcagcaacaaatttacgtattttttaacatcattgtagcaggtgatttttttcaggcgattatttgtgcgttcgggacgtgaatctctggtggttgaaaaatgaacagttttgtacgttctgcactatgcgatgaaggatttttactaaaaaaaagccgctggggtttaaaacacccccagcggctcgttttttacactattgtctcaggaattatctatcgtccgtcgattactcgatatccctttcaatcaacaaactatcatccccttccggagcagacattgggctgtattgccacggattatggtagctctccatcgcctgatagatcacctgggccagctcattattactggacggatcatagcacagcaaatattcggtatcaggtagcggcggtaagccatctactccactcagcacacgcaggtccgggctcatcatctcaaccggccttgccgtcacgccaagaccggctttcactgccgcacgaacggccggaagcgtgctggcgacataagccagtcgccatggaatatctgctttattaagcgtcgccagcaccatatcgcgaaacgggctaggatcatccagcaatacaagagggatcggctcgcctttttgcaatatgtattccgctgcgcagtaccagtgtgttgggctggtacgcaggttcaatgccttaaacgcactaggacgatgggtggttaccatcaaatccacttcctgggattccagcatttctgccatataggcattacgtttaacgcggacatccagcgctaatttcggataaacgctactcacgcgatttaacaggaaaggtaagatcgtatcggcagattcatcactagcaccgatagttaatacgccctgaagattactgaacattaaactactgcaggcctcatcattaaaacgcaggattttcctggcgtaaccaagaagttgaatgccatgttcagttaacagtttgttgcgaccgtgacgagcgaacagttctttcccaacgagttgttccagacgctgcatttgctgacttacggcggactgagtacgacacacagcggcagctgcggcagcaaaagtgttcagatcggcaacagcaacaaatgttctcagcagatcgaggtcgaggttaattatcggacgatttgcacttatcatatattatcacttactggcggctcatactgagctggttaatgctgtgcacacacaaacaagcaattccatttgtaatgtgcctccctggcagtttcatccggaacccggacgaaagtaaaaatgcatatgagttgcactaaaaaagcgactcacattgttccgttataatgcctgaagtagatcacagaatatatcttcagggatcgcatatctattaagttactcactcttttctatttatgacatgcgcgtgtttgtataaatgtaaatgtgagtccttgttccactctcgtgcagcatcgctggtcatacgcgaacacgtaccaacagcaatggtgaggcggcatcaagagcagggatccgtcatttatccgagcattttaccccaaaaaccttttatttataagggtcattgcgaattatctgatgcaaagttatgttatgttaggcaaagtaatcttctattattaataagcacatcaaaacctttttgaatattaaataataattaattagcatcatcctcattcattaattccgcttaacaatagtttcacaccttgcccccattgcgacacctcggaaatcatcacgcagttaaactctccgtaatgaggaaatatcatcatcgcgtttcattagtgaattcttaaatgaggcattttcacacaattatcttacagataaaaaaaccagacttacaattaagaatcagaacaattcactatataacattgcatgtaaagcatatacacctcattattttgtcattattaagttattaacagcacaatcgagccttcccctctggcaaaatcttattctgcagaccttcaaaacaccgtcctgggggagtacattgttctaagctgacttccacggcagggagtggcgataacagcaaaaaaggtcaagattcatgtcccccattgaaaaatccagcaaattagagaatgtctgttatgacatccgtggtccggtgctgaaagaagcaaaacgcctggaagaagaaggtaacaaggtactgaaactgaacatcggcaacccagccccgttcggttttgacgcgccagatgaaatcctcgttgacgtgatacgcaacctgcctaccgctcaagggtattgcgattccaaaggtctttactccgcgcgtaaagccatcatgcagcactaccaggctcgtggcatgcgtgatgttaccgtggaagatatttacatcggcaatggtgtaagcgagcttatcgttcaggcaatgcaggcattgctgaacagcggggacgaaatgttggttcctgcaccagattacccactctggaccgcggcggttagcctttccagcggtaaagcggtgcattatctttgcgatgaatcctctgactggttcccggacctcgatgatattcgcgctaaaattacgcctcgtacgcgtgggatcgttattatcaacccaaataacccaaccggcgcggtatattccaaagagcttttaatggagattgtggagattgcacgtcagcataatctcattatcttcgccgatgaaatttatgacaaaattctctacgacgacgctgagcatcacagtattgcgccgctggcacctgacctgctgaccattacctttaacggactgagcaaaacgtaccgcgttgcaggcttccgtcaggggtggatggtgttgaacgggccgaaaaaacacgccaaaggctacatcgaaggtctggaaatgctggctagtatgcgcctgtgtgctaacgttcctgcgcaacacgccattcagaccgcgctaggtggttatcagagcatcagtgaatttattacccctggcggtcgtctttatgagcagcgtaaccgcgcgtgggaactgatcaacgatattccgggcgtttcctgcgtgaaacctcgtggtgcgctgtatatgttcccgaaaatcgacgccaaacgctttaacattcacgacgatcagaaaatggtgttggatttcctgttgcaggaaaaagttctgttggtgcaagggacggcattcaactggccgtggccggatcacttccgcattgtcacgctaccgcgtgtcgatgatatcgagctgtctttgagcaagttcgcgcgtttcctttctggttatcatcagctgtaatcttaatttcactgccggagattgcatccggcagcgttatcccgccacaatgacctgatgatgtcatcatacgtaaggtcactatgaaacagagccatttttttgcccatctctcccgcctgaaactcattaaccgctggccgctcatgcgcaacgtgcggacggaaaatgtgtccgaacacagtttgcaggtagcgatggtcgcccatgcgctggcagctatcaaaaatcgaaaatttggcggtaatgtcaacgccgaacgtatcgctttactggcgatgtaccacgatgccagtgaagtgctcaccggcgatctccctactccggtgaaatacttcaatagccaaatcgctcaggagtacaaggctattgaaaaaatcgctcagcaaaaactggtcgatatggttccggaagagctgcgggatatctttgcgccgttaattgacgagcatgcatatagcgatgaagaaaaaagcctggtgaaacaggcagatgcactgtgtgcatatctgaaatgtctggaagaactcgcggccggaaataatgaattcttgctggcaaaaacgcgactggaagcgacgcttgaagcgcgtcgcagccaggagatggactacttcatggaaatatttgttcccagcttccatcttagcctcgatgagattagccaggatagtccgctgtaagcagccggagtctgcgtcgcatcaggcaataagcgccggatgcgacatcaggctcttgtcaaaacggaaacagcatcgggatcatcaccacacaaaccgccatcacgataatggtgaacggtacccccaacttcacaaagtcactgaagctgtaatttcccggacctaaaaccagtgtgttaacaggactagaaaccggtgtcataaaggcggcggatgctgccatcgccacgaccatcgcgaatggataagggctcacccccatcgttttggcagcagccagcgcaatcggagccatcaacaccgccgtcgcggtattagagataaatagcccaataaccgcgctcaagacaaacaaacaccccagcatcatatgtggcccgtaaccaccgccaatgtccatcagccctttcaccgccagcgcgacacctcccgttttctgtaatgccacagcaaacggcatcatcccaacgatcaaaataatgctcggccagtgaatggatttataggcgctttcagcatctatacagcggaatttccccatcagcaggcaggcgatgatagcggcaacaggattaggaatttcatctgtcagcattaacgccaccattagcaccagacagaaaatggcatggggtgcctggctgtgcgcgggacttgcttcactcacctcttccggtaagttcagcgctacgaagtcgcggccctgtttggccagcataccgatcagtttccagttacccacaaccaggatgatatcgcccagcagcagaggctcatccgccaggctaccttccagcgccacgccattgcgctttagccccaccacattcagtccgtagcgggtacgaaaaccaatttcgcgcacgcttttaccaatcagttcactctcaggaattaaactaatctctgccatgcccacatcaagggcctggtcagaaaatactcgccgcgcagtaccatcggctccagcaattgctcactacaaaattgccggagatcgacatcagccgcagacatatcaataagcaaaacgtcacgcgcgcgaaattcagaaaccccattaacgttcacgataacgcgacgaaaacgccgccagcgttcaacaccgatgacgttagcgccataacgctcacgtaatttgagatcatccagccgttgaccaatcattgggcttccggggcgaatagccagacgtcgcgcacgcccggtcagtcgatattcacggataagatcgcgaaaggttcgacgcgtccagccttcgcgctgcggggtctgggtatcccctttcagcatgaaacgcatcactaacatatacaaaatacccagcaccagcacgaccaggccaataggtgttacgctaaagaaactgaagccgtgatagccttcacgcagcaattcactgttgactaccaggttcggcggcgtcgccaccagcgtcatcatgccgctaatcagcccggcaaaacttaacggcatcatcagacgactcgggctcgtttgcatacgcatggcaacgcttaacaccacgggaataaagatagcgacaacgccggtactactcataaacgcgccaagccccgcgacggtcagcatcaacaaaaccaacattttgatttcactattgcccgcaactttgaccagccatgttcccattacggtggcaacaccggtacggaccaaaccatcgccaataataaacaaggcggcaatcaggacaacgttaggatcagaaaagccggaaaatacttctgggactgtcagcgttccgcttaatgcaaacgcgacaataacaaacaaagcgaccgcatccatacgcactctgcccgtcgcaaacaagacgatggcaacggccagtaaactaagaacccaaatcaattcaccgttcacaacttatccttgttaattgagggggatgacttgattctgccataaaaaagccccgacgagacggggctaaatcatgatcaggtgtttcactgaataataacatcgccatttggctgtttggtcacagtaatttgctccagactgtggaggaccaaatcgacctcattcaggcgcggggtatctgccggagcgttaaccgcaatgacatgacaacccgccgccaggccagaaagcacgccagcgggagcatcttccaccaccacacactcctgcggcgcaagccccagcagctgcgcgcctaacagatacgcatcaggttctggttttccgcgcttcactcgctcagcggttacaaacacctctggtgcgggaagcccagctattttatggcgcgctcgcgctaccggcatggagccagaagtcacaatggcccacggaatacctgctttattcaaatgactgagtaaggcgattgcccccggaagcgcggtaataccttcggtttccgtggcctcgatgtgctccagacgcgtaaactcggcggcaatatcagcctcggatttgcccgccataaaatggcgcagagaggtgatcgcctgtttaccgtgaatgaaagccagcacctcttccggcgctaacccatgacgtctggcccagttgctccacgcccgttctaccgcaggcagggaatccaccagcgttccatcaagatcaaacagaaaacctttgcaccgcacgcgggcctcctcaggcattgataatttgattaatttcgttggcgctcaaatggtactgacgcgggcaggcatgccacacattaagcatgcgctgatatttttcccacattggcgtctgggcgttaaaaccgtgagttccggcgtcaaaatgggtatagcgcccttccacattaaccataaagcggacataaccgaggtaacgtgcttcagtggcggcgtcaaagccgaggaaggtgacacgacgttcatcgatggattgctggtcctgcaaattagaccaggaaacatgcaacgcatgatacatctccataatgtcgatgatagtgcggcaggtttcttctttcagctcgccaaactcgcgatccaattcacgcatctgtaatccgtaaccacgctcaataattgtttgcaggcgacggtaacgttcagcatttgccggatcgagcatagtcatcatcttgtactgattagacaaaataagacgttgcgcgttggtcatttccattgttgactcctgtatcactctactacggtgaaaaaaaagaaggctgagtatgccttcttttatatgcgtaatcaggggtcaattacaaatcatcaaggaaagttttatccagttgtttgaaggcgcgcttaagcgtgtcagctaatgcctggtaatcaggcttgccttcaacgggtgccaacacctgtccagactcctgcaatttaccgcgaacttcataaaaccagttaaggattgcagggggtaatggcgtgacagaacgcttgcccagccaccacaatccctgcatgggtaaacttaaggcgaacagggcagtggcaactgccggcccaagctgaccgcccagggcaatctgccagcagagagtaaatacggcgatcggcggcataaaacggatcgcataacgcgtcatcttgataacgcgattttcgacaaagaccggggcaaggcgtttttccagcggccacgtcttactgtaatgctgtccccggcgaaacaagctaaaaaaattaacagaacgattatccggcgtactcatgcttcacctcaacttcacatataaagattcaaaaatttgtgcaaattcacaactcagcgggacaacgttcaaaacattttgtcttccatacccactatcaggtatcctttagcagcctgaaggcctaagtagtacatattcattgagtcgtcaaattcatatacattatgccattggctgaaaattacgcaaaatggcatagactcaagatatttcttccatcatgcaaaaaaaatttgcagtgcatgatgttaatcataaatgtcggtgtcatcatgcgctacgctctatggctccctgacgtttttttagccacgtatcaattataggtacttccatgagcagtaagttagtactggttctgaactgcggtagttctagtctgaaatttgccatcatcgatgcagtaaatggtgaagagtacctttctggtttagccgaatgtttccacctgcccgaagcacgtatcaaatggaaaatggacggcaataaacaggaagcggctttaggtgcaggcgccgctcacagcgaagcgctcaactttatcgttaatactattctggcacaaaaaccagaactgtctgcgcagctgactgctatcggtcaccgtatcgtacacggcggcgaaaagtataccagctccgtagtgatcgatgagtctgttattcagggtatcaaagatgcagcttcttttgcaccgctgcacaacccggctcacctgatcggtatcgaagaagctctgaaatctttcccacagctgaaagacaaaaacgttgctgtatttgacaccgcgttccaccagactatgccggaagagtcttacctctacgccctgccttacaacctgtacaaagagcacggcatccgtcgttacggcgcgcacggcaccagccacttctatgtaacccaggaagcggcaaaaatgctgaacaaaccggtagaagaactgaacatcatcacctgccacctgggcaacggtggttccgtttctgctatccgcaacggtaaatgcgttgacacctctatgggcctgaccccgctggaaggtctggtcatgggtacccgttctggtgatatcgatccggcgatcatcttccacctgcacgacaccctgggcatgagcgttgacgcaatcaacaaactgctgaccaaagagtctggcctgctgggtctgaccgaagtgaccagcgactgccgctatgttgaagacaactacgcgacgaaagaagacgcgaagcgcgcaatggacgtttactgccaccgcctggcgaaatacatcggtgcctacactgcgctgatggatggtcgtctggacgctgttgtattcactggtggtatcggtgaaaatgccgcaatggttcgtgaactgtctctgggcaaactgggcgtgctgggctttgaagttgatcatgaacgcaacctggctgcacgtttcggcaaatctggtttcatcaacaaagaaggtacccgtcctgcggtggttatcccaaccaacgaagaactggttatcgcgcaagacgcgagccgcctgactgcctgatttcacaccgccagctcagctggcggtgctgttttgtaacccgccaaatcggcggtaacgaaagaggataaaccgtgtcccgtattattatgctgatccctaccggaaccagcgtcggtctgaccagcgtcagccttggcgtgatccgtgcaatggaacgcaaaggcgttcgtctgagcgttttcaaacctatcgctcagccgcgtaccggtggcgatgcgcccgatcagactacgactatcgtgcgtgcgaactcttccaccacgacggccgctgaaccgctgaaaatgagctacgttgaaggtctgctttccagcaatcagaaagatgtgctgatggaagagatcgtcgcaaactaccacgctaacaccaaagacgctgaagtcgttctggttgaaggtctggtcccgacacgtaagcaccagtttgcccagtctctgaactacgaaatcgctaaaacgctgaatgcggaaatcgtcttcgttatgtctcagggcactgacaccccggaacagctgaaagagcgtatcgaactgacccgcaacagcttcggcggtgccaaaaacaccaacatcaccggcgttatcgttaacaaactgaacgcaccggttgatgaacagggtcgtactcgcccggatctgtccgagattttcgacgactcttccaaagctaaagtaaacaatgttgatccggcgaagctgcaagaatccagcccgctgccggttctcggcgctgtgccgtggagctttgacctgatcgcgactcgtgcgatcgatatggctcgccacctgaatgcgaccatcatcaacgaaggcgacatcaatactcgccgcgttaaatccgtcgctttctgcgcacgcagcattccgcacatgctggagcacttccgtgccggttctctgctggtgacttccgcagaccgtcctgacgtgctggtggccgcttgcctggcagccatgaacggcgtagaaatcggtgccctgctgctgactggcggttacgaaatggacgcgcgcatttctaaactgtgcgaacgtgctttcgctaccggcctgccggtatttatggtgaacaccaacacctggcagacctctctgagcctgcagagcttcaacctggaagttccggttgacgatcacgaacgtatcgagaaagttcaggaatacgttgctaactacatcaacgctgactggatcgaatctctgactgccacttctgagcgcagccgtcgtctgtctccgcctgcgttccgttatcagctgactgaacttgcgcgcaaagcgggcaaacgtatcgtactgccggaaggtgacgaaccgcgtaccgttaaagcagccgctatctgtgctgaacgtggtatcgcaacttgcgtactgctgggtaatccggcagagatcaaccgtgttgcagcgtctcagggtgtagaactgggtgcagggattgaaatcgttgatccagaagtggttcgcgaaagctatgttggtcgtctggtcgaactgcgtaagaacaaaggcatgaccgaaaccgttgcccgcgaacagctggaagacaacgtggtgctcggtacgctgatgctggaacaggatgaagttgatggtctggtttccggtgctgttcacactaccgcaaacaccatccgtccgccgctgcagctgatcaaaactgcaccgggcagctccctggtatcttccgtgttcttcatgctgctgccggaacaggtttacgtttacggtgactgtgcgatcaacccggatccgaccgctgaacagctggcagaaatcgcgattcagtccgctgattccgctgcggccttcggtatcgaaccgcgcgttgctatgctctcctactccaccggtacttctggtgcaggtagcgacgtagaaaaagttcgcgaagcaactcgtctggcgcaggaaaaacgtcctgacctgatgatcgacggtccgctgcagtacgacgctgcggtaatggctgacgttgcgaaatccaaagcgccgaactctccggttgcaggtcgcgctaccgtgttcatcttcccggatctgaacaccggtaacaccacctacaaagcggtacagcgttctgccgacctgatctccatcgggccgatgctgcagggtatgcgcaagccggttaacgacctgtcccgtggcgcactggttgacgatatcgtctacaccatcgcgctgactgcgattcagtctgcacagcagcagtaatctcgtcatcatccgcagctttgcgctgcggatatctgaaccggaaataatcactatttccggttttttattctcttaatttgcattaatcctttctgattatcttgcttaactgcgctgcatcaatgaattgcgccatcccactttgcatacttaccactttgttttgtgcaagggaatatttgcgctatgtccgcaatcactgaatccaaaccaacaagaagatgggcaatgcccgatacgttggtgattatcttttttgttgctattttaaccagccttgccacctgggtagttccggtggggatgtttgacagtcaggaagtgcagtatcaggttgatggtcaaacaaaaacacgcaaagtcgtagatccacacagttttcgcattctgactaacgaagcaggcgaacctgagtatcaccgcgtacagctgttcacgacgggcgatgaacgcccgggcctgatgaacttcccgtttgaaggattaaccagtggaagcaaatacgggacagccgttggcatcatcatgtttatgctggtgattggcggcgcgtttggcattgtgatgcgtacaggaaccattgataacggtatcctggcgcttattcgccatacccgcgggaatgaaattctctttattcctgcgctgtttattctgtttagtcttggcggcgcggtatttggtatgggagaagaggccgtcgcctttgccattatcatcgcaccgctaatggtccggctgggctatgacagtattaccaccgtcctggtgacctatattgccacgcaaatcggttttgccagtagctggatgaacccgttttgtgtggtcgttgctcaggggattgccggcgttccggtgctttctggctccgggttgcgtatcgtggtgtgggttatcgccactctgattggcctgatctttaccatggtgtacgccagtcgagtgaaaaagaatcctcttctgagtcgcgtgcatgagtccgaccgcttctttcgtgaaaagcaggctgatgttgaacaacgtccgtttacctttggtgactggctggtattgattgtcctgaccgccgtaatg
